(19) United States
(12) Patent Application Publication
(10) Pub. No.: US 2013/0332083 A1
(43) Pub. Date: Dec. 12, 2013

(54) Gene Marker Sets And Methods For Classification Of Cancer Patients

(71) Applicant: Ryan Van Laar, New Yorlk, NY (US)

(72) Inventor: Ryan Van Laar, New Yorlk, NY (US)

(21) Appl. No.: 13/877,050

(22) PCT Filed: Sep. 29, 2011
(86) PCT No.: PCT/AU11/01250

§ 371 Date: May 28, 2013

Related U.S. Application Data
(60) Provisional application No. 61/388,181, filed on Sep. 30, 2010.

(51) Int. Cl. G06F 19/24; G06F 19/00

(52) U.S. Cl. CPC G06F 19/24; G06F 19/345
USPC 702/19

(57) ABSTRACT

The present invention relates to gene marker sets for use in classification of cancer patients on the basis of expression of multiple biological markers. The gene marker sets allow identification of the tissue of origin of a metastatic tumor, provide prognostic data on breast cancer recurrence, prognostic data on colon cancer recurrence in cancer patients, or prognosis of increased risk of death of lung cancer patients. The invention also provides methods of use of the gene marker sets for classification. The invention is particularly suited to the generation of microarrays and other high-throughput platforms for diagnostic and prognostic purposes.

### FIELD OF THE INVENTION

[0001] The present invention relates to gene marker sets for use in classification of cancer patients on the basis of expression of multiple biological markers, and methods of use therefor. The invention is particularly suited to the generation of microarrays and other high-throughput platforms for diagnostic and prognostic purposes, although it will be appreciated that the invention may have wider applicability.

### BACKGROUND TO THE INVENTION

[0002] It has long been recognised that diagnosis and treatment of disease on the basis of epidemiologic studies may not be ideal, especially when the disease is a complex one having multiple causative factors and many subtypes with possibly wildly varying outcomes for the patient. This has recently led to an increased emphasis on so-called “personalised medicine”, whereby specific characteristics of the individual are taken into account when providing care.

[0003] An important development in the move towards personalised care has been the ability to identify molecular markers which are associated with a particular disease state, predictive of the individual's chance of relapse/recurrence or response to a particular treatment.

[0004] In cancer cases where a tumor has metastasized, it is important to determine the tissue of origin of the tumor. The current diagnostic standard in such cases includes imaging, serum tests and immunohistochemistry (IHC) using one or more of a panel of known antibodies of different tumor specificity [Burton, et al. 1998, Jama: 280; Pavlidis, et al. 2003, Eur J Cancer: 39; Varadhachary, et al. 2004, Cancer: 100]. For approximately 3-5% of all cases, known as Cancer of Unknown Primary (CUP), these conventional approaches do not reach a definitive diagnosis, although some may eventually be solved with further, more extensive investigations [Horlings, et al. 2008, J Clin Oncol: 26]. The range of tests able to be performed can depend not only on an individual patient's ability to tolerate potentially invasive, costly and time consuming diagnostic procedures, but also on the diagnostic tools at the clinician's disposal, which may vary between hospitals and countries.

[0005] In relation to breast cancer, the estrogen receptor (ER) or HER2/neu (ERBB-2) status of a tumor can be used in determining a patient's suitability for therapies that target these molecules in the tumor cells. These molecular markers are examples of “companion diagnostics” which are used in conjunction with traditional tests such as histological status in order to determine a patient's risk of disease recurrence and therefore to guide treatment regimes, based on the estimated risk.

[0006] In relation to colon cancer, a similar paradigm exists, in which the decision whether to treat patients with non-metastatic colon cancer using adjuvant chemotherapy is predominantly determined by clinical staging (i.e. extent of tumor spread of the tumor at the time of diagnosis), frequently resulting in over- or under-treatment.

[0007] In relation to lung cancer, tumors that are detected in the early stages of disease progression present a challenge to physicians. While surgery and/or radiotherapy are curative for many patients in this category, a proportion will experience a rapid progression of their tumor and subsequently die of their disease within 2-5 years. Furthermore, treating all early-stage lung tumors with chemotherapy results in varying levels of response, with some patients experiencing disease remission and high rates of disease-free survival at 3-5 years, and others exhibiting no benefit from receiving the same course of treatment.

[0008] To date, most diagnostic protocols are primarily reliant on microscopy, single gene or immunohistochemical biomarkers (IHC) and imaging techniques such as magnetic-resonance imaging (MRI) and positron emission tomography (PET). Unfortunately, these techniques all have limitations and may not provide adequate information to accurately predict patient outcome, response to treatment or to diagnose the primary origin of metastasized tumors or poorly differentiated malignancies.

[0009] It has been hypothesized that the information gained from gene expression profiling can be used as a companion diagnostic to the above protocols, helping to confirm or refine the predicted primary origin of metastatic/poorly differentiated tumors, or predict a patients' chance of disease recurrence (i.e. prognosis), in the case of pre-metastatic breast and colon cancer.

[0010] Since the advent of various robotic and high throughput genomic technologies, including quantitative polymerase chain reaction (qPCR) and microarrays, several groups have investigated the use of gene expression data to predict the primary origin of a metastatic tumor [Bloom, et al. 2004, The American journal of pathology: 164; Dumur, et al. 2008, J Mol Diagn: 10; Ma, et al. 2006, 130; Tothill, et al. 2005, Cancer Res: 65; van Laar, et al. 2009, Int J Cancer: 125]. Prediction accuracies in the literature range from 78% to 89%.

[0011] A number of gene expression based, commercial diagnostic services have arisen since the sequencing of the human genome, offering a range of personalized diagnostic and prognostic assays. These services represent a significant advance in patient access to personalized medicine. However the requirement of shipping fresh or preserved human tissue to an interstate or international reference laboratory has the potential to expose sensitive biological molecules to adverse weather conditions and logistical delays. In some parts of the world it may also be prohibitively expensive to ship human tissue to a reference laboratory in a timely fashion, thus limiting access to this new technology.

[0012] The present invention provides a method for diagnosis and/or prognosis of a cancer patient, and provides defined sets of gene markers which can be used to determine tumor tissue origin, the likelihood of breast cancer recurrence and death, the likelihood of colon cancer recurrence and death, the prognosis of increased risk of death of lung cancer patients, and predicts adjuvant chemotherapy response in lung cancer patients.

### SUMMARY OF THE INVENTION

[0013] The invention provides gene marker sets that identify the tissue of origin of a metastatic tumor, provide prognostic data on breast cancer recurrence, prognostic data on colon cancer recurrence in cancer patients, or prognosis of increased risk of death of lung cancer patients, and methods of use thereof.

[0014] Accordingly, in a first aspect, the present invention provides a method for classifying a biological test sample from a cancer patient, including the steps of:

[0015] selecting a set of marker molecules from;
[0016] a) any combination of 100 or more of the polynucleotides listed in Table 1, wherein the polynucleotides are represented by oligonucleotide probes described by SEQ ID NOS: 1-24196;
[0017] b) any combination of 100 or more of the polynucleotides listed in Table 3, wherein the polynucleotides are represented by oligonucleotide probes described by SEQ ID NOS: 171-270 and 25777-27864;
[0018] c) any combination of 15 or more of the polynucleotides listed in Table 6, wherein the polynucleotides are represented by oligonucleotide probes described by SEQ ID NOS: 1-170 and 24197-25776;
[0019] d) any combination of 2 or more of the polynucleotides listed in Table 8, wherein the polynucleotides are represented by oligonucleotide probes described by SEQ ID NOS: 1-11, 171-183, 271-383, 25777-25787 and 27865-29496; and
[0020] e) any combination of 2 or more of the polynucleotides listed in Table 9, wherein the polynucleotides are represented by oligonucleotide probes described by SEQ ID NOS: 384-476, 27865-27880 and 29497-29809,

[0021] providing a database populated with reference expression data, the reference expression data including expression levels of a plurality of molecules in a plurality of reference samples, the plurality of molecules including at least the marker molecules, each reference sample having a pre-assigned value for each of one or more clinically significant variables selected from the group including disease state, disease prognosis, and treatment response;

[0022] accepting input expression data, the input expression data including a test vector of expression levels of the marker molecules in the biological test sample; and

[0023] assigning one of said pre-assigned values to the test sample for at least one of said clinically significant variables by passing the test vector to a statistical classification program;

[0024] wherein the statistical classification program has been trained to distinguish among said pre-assigned values on the basis of that part of the reference data corresponding to expression levels of the marker molecules.

[0025] The database may be in communication with a server computer which is interconnected to at least one client computer by a data network, said server computer being configured to accept the input expression data from the client computer.

[0026] Hosting the database on a server and allowing remote upload can improve the speed and efficiency of diagnosis. The clinician, having conducted a biopsy and assayed the sample (either themselves, or via a service laboratory located on site or nearby) to obtain a data file containing the expression levels of the marker molecules, can then simply upload the data file to the server for analysis and receive the test results within a short space of time, possibly within seconds. The server may reside on an internal network to which the clinician has access, or may be located on a wide area network, for example in the form of a Web server. The latter is particularly advantageous as it allows hosting and maintenance of a server accessing a large database of samples in one location, while a clinician located anywhere in the world and having access to relatively modest local resources can upload a data file to obtain a diagnosis based on a comprehensive set of annotated samples, such an analysis otherwise being inaccessible to the clinician.

[0027] In the case of cancer, the clinically significant variables may be organised according to a hierarchy, the levels of which may be selected from the group consisting of anatomical system, tissue type and tumor subtype. In that case, the classification program may include a multi-level classifier which classifies the test sample according to anatomical system, then tissue type, then tumor subtype. This provides a multi-marker, multi-level classification which is analogous to, but independent of, traditional approaches to diagnosis of tumor origin.

[0028] The marker molecules may include any combination of 100 or more of the polynucleotides listed in Table 1, wherein the polynucleotides are represented by oligonucleotide probes described by SEQ ID NOS: 1-24196. We have found that sets of 100 or more of these molecules can provide a classification accuracy of greater than 94% for anatomical system and greater than 92% for tissue type.

[0029] In another embodiment, the disease is breast cancer, in which case the clinically significant variable may be risk of recurrence of the disease. The marker molecules in this embodiment may include sets of 100 or more of the polynucleotides listed in Table 3, wherein the polynucleotides are represented by oligonucleotide probes described by SEQ ID NOS: 171-270 and 25777-27864. Preferably, a set of the 200 polynucleotides listed in Table 3 is used. This is a prognostic, rather than diagnostic, application of the invention.

[0030] In another embodiment, the disease is colon cancer, in which case the clinically significant variable may be risk of recurrence of the disease. The marker molecules in this embodiment may include sets of 15 or more of the polynucleotides listed in Table 6, wherein the polynucleotides are represented by oligonucleotide probes described by SEQ ID NOS: 1-170 and 24197-25776. Preferably, a set of the 163 polynucleotides listed in Table 6 is used.

[0031] In another embodiment, the disease is lung cancer, more particularly non-small-cell-lung cancer, in which case the clinically significant variable may be to identify patients with stage I/II adenocarcinoma who are at increased risk of death. The marker molecules in this embodiment may include sets of 2 or more of the polynucleotides listed in Table 8, wherein the polynucleotides are represented by oligonucleotide probes described by SEQ ID NOS: 1-11, 171-183, 271-383, 25777-25787 and 27865-29496. Preferably, a set of the 160 polynucleotides listed in Table 8 is used. This is also a prognostic application of the invention.

[0032] In another embodiment, the disease is lung cancer, more particularly non-small-cell-lung cancer, in which case the clinically significant variable may be to predict adjuvant chemotherapy (ACT) response in patients with non-small-cell lung cancer. The marker molecules in this embodiment may include sets of 2 or more of the polynucleotides listed in Table 9, wherein the polynucleotides are represented by oligonucleotide probes described by SEQ ID NOS: 384-476, 27865-27880 and 29497-29809. Preferably, a set of the 37 polynucleotides listed in Table 9 is used.

[0033] In a particularly preferred embodiment, the reference expression data may be generated using a platform selected from the group including cDNA microarrays, oligonucleotide microarrays, protein microarrays, microRNA (miRNA) arrays, and high-throughput quantitative polymerase chain reaction (qPCR). Microarrays can be produced on any suitable solid support known in the art, the more preferable supports being plastic or glass.

[0034] Oligonucleotide microarrays are particularly preferred for use in the present invention. If this type of microarray is used, each molecule being assayed is a polynucleotide, which may either be represented by a single probe on the microarray or by multiple probes, each probe having a different nucleotide sequence corresponding to part of the polynucleotide. If multiple probes are present, one of said analysis programs might include instructions for summarising the expression levels of the multiple probes into a single expression level for the polynucleotide.

[0035] Oligonucleotide microarrays such as those manufactured by Affymetrix, Inc and marketed under the trademark GeneChip currently represent the vast majority of microarrays in use for gene (and other nucleotide) expression studies. As such, they represent a standardised platform which particularly lends itself to collation of large databases of expression data, for example from cancer patients, in order to provide a basis for diagnostic or prognostic applications such as those provided by the present invention.

[0036] Preferably, the input expression data are generated using the same platform as the reference expression data. If the input expression data are generated using a different platform, then the identifiers of the molecules in the input data are matched to the identifiers of the molecules in the reference data prior to performing classification, for example on the basis of sequence similarity, or by any other suitable means such as on the basis of GenBank accession number, Refseq or Unigene ID.

[0037] Preferably, the statistical classification program includes an algorithm selected from the group including k-nearest neighbors (kNN), linear discriminant analysis, principal components analysis (PCA), nearest centroid classification (NCC) and support vector machines (SVM).

[0038] In a further aspect of the present invention, there is provided a method of classifying a biological test sample from a cancer patient, including the step of:

[0039] comparing expression levels in the test sample of a set of marker molecules, selected from;
[0040] a) any combination of 100 or more of the polynucleotides listed in Table 1, wherein the polynucleotides are represented by oligonucleotide probes described by SEQ ID NOS: 1-24196;
[0041] b) any combination of 100 or more of the polynucleotides listed in Table 3, wherein the polynucleotides are represented by oligonucleotide probes described by SEQ ID NOS: 171-270 and 25777-27864;
[0042] c) any combination of 15 or more of the polynucleotides listed in Table 6, wherein the polynucleotides are represented by oligonucleotide probes described by SEQ ID NOS: 1-170 and 24197-25776;
[0043] d) any combination of 2 or more of the polynucleotides listed in Table 8, wherein the polynucleotides are represented by oligonucleotide probes described by SEQ ID NOS: 1-11, 171-183, 271-383, 25777-25787 and 27865-29496; and
[0044] e) any combination of 2 or more of the polynucleotides listed in Table 9, wherein the polynucleotides are represented by oligonucleotide probes described by SEQ ID NOS: 384-476, 27865-27880 and 29497-29809;
   to expression levels of said set of marker molecules in a set of reference samples, each member of the set of reference samples having a known clinical annotation, to assign a clinical annotation to the test sample,

[0045] wherein the clinical annotation is selected from the group including anatomical system, tissue of origin, tumor subtype, risk of cancer recurrence, prognosis of increased risk of death, and prediction of adjuvant chemotherapy response.

[0046] In a yet further aspect, the present invention provides use of a set of marker molecules including any combination of 100 or more of the polynucleotides listed in Table 1, wherein the polynucleotides are represented by oligonucleotide probes described by SEQ ID NOS: 1-24196, in a method of classifying a biological test sample from a cancer patient, including the step of:

[0047] comparing expression levels of the set of marker molecules in the test sample to expression levels of said set of marker molecules in a set of reference samples, each member of the set of reference samples having a known clinical annotation, to assign a clinical annotation to the test sample,

[0048] wherein the clinical annotation is selected from the group including anatomical system, tissue of origin, and tumor subtype.

[0049] In a yet further aspect, the present invention provides use of a set of marker molecules including the polynucleotides listed in Table 3, wherein the polynucleotides are represented by oligonucleotide probes described by SEQ ID NOS: 171-270 and 25777-27864, in a method of classifying a biological test sample from a cancer patient with breast cancer, including the step of:

[0050] comparing expression levels of the set of marker molecules in the test sample to expression levels of said set of marker molecules in a set of reference samples, each member of the set of reference samples having a known clinical annotation, to assign a clinical annotation to the test sample,

[0051] wherein the clinical annotation is risk of breast cancer recurrence.

[0052] In a yet further aspect, the present invention provides use of a set of marker molecules including the polynucleotides listed in Table 6, wherein the polynucleotides are represented by oligonucleotide probes described by SEQ ID NOS: 1-170 and 24197-25776, in a method of classifying a biological test sample from a cancer patient with colon cancer, including the step of:

[0053] comparing expression levels of the set of marker molecules in the test sample to expression levels of said set of marker molecules in a set of reference samples, each member of the set of reference samples having a known clinical annotation, to assign a clinical annotation to the test sample,

[0054] wherein the clinical annotation is risk of colon cancer recurrence.

[0055] In a yet further aspect, the present invention provides use of a set of marker molecules including the polynucleotides listed in Table 8, wherein the polynucleotides are represented by oligonucleotide probes described by SEQ ID NOS: 1-11, 171-183, 271-383, 25777-25787 and 27865-29496, in a method of classifying a biological test sample from a cancer patient with lung cancer, including the step of:

[0056] comparing expression levels of the set of marker molecules in the test sample to expression levels of said set of marker molecules in a set of reference samples, each member of the set of reference samples having a known clinical annotation, to assign a clinical annotation to the test sample,

[0057] wherein the clinical annotation is prognosis of increased risk of death.

[0058] In a yet further aspect, the present invention provides use of a set of marker molecules including the polynucleotides listed in Table 9, wherein the polynucleotides are represented by oligonucleotide probes described by SEQ ID NOS: 384-476, 27865-27880 and 29497-29809, in a method of classifying a biological test sample from a cancer patient with lung cancer, including the step of:

[0059] comparing expression levels of the set of marker molecules in the test sample to expression levels of said set of marker molecules in a set of reference samples, each member of the set of reference samples having a known clinical annotation, to assign a clinical annotation to the test sample,

[0060] wherein the clinical annotation is prediction of adjuvant chemotherapy response.

[0061] In a yet further aspect, the present invention provides a set of marker molecules, for use in classifying a biological test sample from a cancer patient, selected from the group;
[0062] a) any combination of 100 or more of the polynucleotides listed in Table 1, wherein the polynucleotides are represented by oligonucleotide probes described by SEQ ID NOS: 1-24196;
[0063] b) any combination of 100 or more of the polynucleotides listed in Table 3, wherein the polynucleotides are represented by oligonucleotide probes described by SEQ ID NOS: 171-270 and 25777-27864;
[0064] c) any combination of 15 or more of the polynucleotides listed in Table 6, wherein the polynucleotides are represented by oligonucleotide probes described by SEQ ID NOS: 1-170 and 24197-25776;
[0065] d) any combination of 2 or more of the polynucleotides listed in Table 8, wherein the polynucleotides are represented by oligonucleotide probes described by SEQ ID NOS: 1-11, 171-183, 271-383, 25777-25787 and 27865-29496; and
[0066] e) any combination of 2 or more of the polynucleotides listed in Table 9, wherein the polynucleotides are represented by oligonucleotide probes described by SEQ ID NOS: 384-476, 27865-27880 and 29497-29809.

[0067] In a yet further aspect, the present invention provides a set of marker molecules for use in classifying a biological test sample from a cancer patient wherein the marker molecule set includes 100 or more of the polynucleotides listed in Table 1, wherein the polynucleotides are represented by oligonucleotide probes described by SEQ ID NOS: 1-24196.

[0068] In a yet further aspect, the present invention provides a set of marker molecules for use in classifying a biological test sample from a cancer patient, wherein the marker molecule set includes the 200 polynucleotides listed in Table 3, wherein the polynucleotides are represented by oligonucleotide probes described by SEQ ID NOS: 171-270 and 25777-27864.

[0069] In a yet further aspect, the present invention provides a set of marker molecules for use in classifying a biological test sample from a cancer patient, wherein the marker molecule set includes the 163 polynucleotides listed in Table 6, wherein the polynucleotides are represented by oligonucleotide probes described by SEQ ID NOS: 1-170 and 24197-25776.

[0070] In a yet further aspect, the present invention provides a set of marker molecules for use in classifying a biological test sample from a cancer patient, wherein the marker molecule set includes the 160 polynucleotides listed in Table 8, wherein the polynucleotides are represented by oligonucleotide probes described by SEQ ID NOS: 1-11, 171-183, 271-383, 25777-25787 and 27865-29496.

[0071] In a yet further aspect, the present invention provides a set of marker molecules for use in classifying a biological test sample from a cancer patient, wherein the marker molecule set includes the 37 polynucleotides listed in Table 9, wherein the polynucleotides are represented by oligonucleotide probes described by SEQ ID NOS: 384-476, 27865-27880 and 29497-29809.

[0072] Further, a preferred aspect of the invention relates to microarrays specific for each diagnostic or prognostic test which include the specifically disclosed marker sets.

[0073] In one embodiment, the invention provides microarrays which include a substrate and at least 100 markers selected from any one of Tables 1, 3, 6, 8 or 9 attached to the substrate.

[0074] In a more specific embodiment, at least 80%, 90%, 95% or 100% of the markers defined in Tables 1, 3, 6, 8 and 9 are on a single microarray or, alternatively, on separate test-specific microarrays.

[0075] In a preferred embodiment a microarray may include a substrate and oligonucleotide probes representing the marker sets from one or more of Tables 1, 3, 6, 8 and 9 attached thereto.

[0076] In another preferred embodiment a microarray for testing tumor tissue origin will include a substrate and oligonucleotide probes representing markers from Table 1 attached thereto, whereas a microarray for prognosis of breast cancer recurrence will include a substrate and oligonucleotide probes representing markers from Table 3 attached thereto, a microarray for prognosis of colon cancer recurrence will include a substrate and oligonucleotide probes representing markers from Table 6 attached thereto, a microarray for prognosis of increased risk of death in lung cancer patients will include a substrate and oligonucleotide probes representing markers from Table 8 attached thereto, and a microarray for predicting adjuvant chemotherapy benefit in lung cancer patients will include a substrate and oligonucleotide probes representing markers from Table 9 attached thereto.

### BRIEF DESCRIPTION OF THE DRAWINGS

[0077] FIG. 1 is a schematic of a system suitable for methods of the present invention;

[0078] FIG. 2 schematically shows the steps of an exemplary method in accordance with the invention;

[0079] FIG. 3 shows a schematic of another embodiment in which user requests are processed in parallel;

[0080] FIG. 4 shows the position of samples belonging to a reference data set in multi-dimensional expression data space;

[0081] FIG. 5 summarises clinical annotations of reference samples in a reference data set used in one of the Examples;

[0082] FIGS. 6(a) and 6(b) show the classification accuracy for a multi-level classifier as used in one of the Examples;

[0083] FIGS. 7(a) and 7(b) show cross-validation results for a classification program used in another Example; and

[0084] FIGS. 8(a) and 8(b) show independent validation results for the classification program used in the Example of FIGS. 7(a) and 7(b).

[0085] FIGS. 9(a) and 9(b) shows the cross validation accuracy of the colon cancer classifier, using subsets of the full 163-gene model.

[0086] FIGS. 10(a) and 10(b) shows the cross validation accuracy of the breast cancer classifier, using subsets of the full 200-gene model.

[0087] FIG. 11 shows the 200 gene set used by the breast cancer classifier, as measured in the training series of patients used to derive the signature, in addition to the clinical details for each patient, their disease recurrence status and prognostic index.

[0088] FIG. 12 shows the 163 gene set used by the colon cancer classifier, as measured in the training series of patients used to derive the signature, in addition to the clinical details for each patient, their disease recurrence status and prognostic index.

[0089] FIG. 13 shows a gene expression heat map of the 160-gene signature in 301 patients from training series A. The association between the gene expression profile (red=relative high expression, green=relative low expression) the prognostic index calculated from these values and patient outcome (disease-specific death within 3 years) can be observed. Each gene in the signature is significantly associated with outcome, independent to age, stage, grade, gender and smoking history.

[0090] FIG. 14 shows Kaplan Meier analysis of validation series A patients, stratified by gene expression risk group and clinical stage. Validation series A Stage I patients (N=190) classified based on (C) American Joint Committee on Cancer (AJCC) clinical stage, (D) a clinical algorithm based on tumor size and age at diagnosis and (E) the 160-gene signature. The gene expression signature is able to more accurately identify stage I patients at risk of death within the first 12-24 months following diagnosis compared to stage sub-groups and the combined clinical age+tumor size algorithm.

[0091] FIG. 15 shows Kaplan Meier analysis: 37-gene signature treatment response predictions for independent validation series B. Patients in (A) Predicted ‘ACT’ benefit group exhibit significantly improved rate of Disease-specific-survival (DSS) when treated with ACT compared to OBS alone. Patients in (B) Predicted ‘No ACT benefit’ group do not exhibit a significant difference in DSS between either treatment arm of the trial.

### DESCRIPTION OF PREFERRED EMBODIMENTS

[0092] In the following discussion, embodiments of the invention will be described mostly by reference to examples employing Affymetrix GeneChips, which are a suitable platform for the gene marker sets of the invention. However, it will be understood by the skilled person that the methods and systems described herein may be readily adapted for use with other types of oligonucleotide microarray, or other measurement platforms. Microarray technology is now well known, in respect of types of microarrays and methods of use (for example; [Hoheisel 2006, Nat Rev Genet: 7]).

[0093] The terms “gene”, “probe set”, “marker set”, and “molecule” are used interchangeably for the purposed of the preferred embodiments described herein, but are not to be taken as limiting on the scope of the invention.

[0094] The invention provides sets of genetic markers whose expression in cancer patients can be used to determine tumor tissue origin, the likelihood of breast cancer recurrence, or the likelihood of colon or lung cancer recurrence. The respective gene marker sets are listed in Tables 1, 3, 6, 8 and 9 and, more specifically, the oligonucleotide probes for each gene of the respective gene set are provided in the Sequence Listing appended to this application.

[0095] Referring to FIGS. 1 and 2, there is shown in schematic form a system 100 and method 200 for classifying a biological test sample. The sample is acquired 220 by a clinician and then treated 230 to extract, fluorescently label and hybridise RNA to microarray 115 according to standard protocols prescribed by the manufacturer of the microarray. Following hybridisation, the surface of the microarray is scanned at high resolution to detect fluorescence from regions of the surface corresponding to different RNA species. In the case of Affymetrix arrays, each scanned “feature” region contains hundreds of thousands of identical oligonucleotides (25mers), which hybridise to any complementary fluorescently labelled molecules present in the test sample. The fluorescence intensity detected from each feature region is thus correlated with the abundance (expression level) of the complementary sequence in the test sample.

[0096] The scanning step results in the production of a raw data file (a CEL file), which contains the intensity values (and other information) for each probe (feature region) on the array. Each probe is one of the 25mers described above and forms part of one of a multiplicity of “probe sets”. Each probe set contains multiple probes, usually 11 or more for a gene expression microarray. A probe set usually represents a gene or part of a gene. Occasionally, a gene will be represented by more than one probe set.

[0097] Once the CEL file is obtained, the user may upload it (step 120 or 240) to server 110.

### Accepting Input Data

[0098] In the preferred embodiments, the system is implemented using a network including at least one server computer 110, for example a Web server, and at least one client computer. Software running on the Web server can be used to accept the input data file (CEL file) containing the multiple molecule abundance measurements (probe signals) for a particular patient from the client computer over a network connection. This information is stored in the system user's dedicated directory on a file server, with upload filenames, date/time and other details stored in a relational database 112 to allow for later retrieval.

[0099] The Web server 110 subsequently allows the user to select individual CEL files for analysis by a list of available diagnostic and prognostic methods, the list being able to be configured to add new methods as they are implemented. Results from the specific analysis requested, in the format of text, numbers and images, are also stored in the relational database 112 and delivered to the user via the Web server 110. All data generated by a particular user is linked to a unique identifier and can be retrieved by the user by logging into to the Web server 110 using a username and password combination.

[0100] When an analysis is requested by the user, at step 122, the raw data from the CEL file are passed to a processor, which executes a program 130a contained on a storage medium, which is in communication with the processor.

### Accepting Clinical Data Input

[0101] In conjunction with the file that contains the multiple molecule abundance measurements (probe signals) for a particular patient, the user can also be asked to input other information about the patient. This information can be used for predictive, prognostic, diagnostic or other data analytical purposes, independently or in association with the molecular data. These variables can include patient age, gender, tumor grade, estrogen receptor status, Her-2 status, or other clinico-pathological assessments. An electronic form can be used to collect this information, which the user can submit to a secure relational database.

[0102] Algorithms that combine ‘traditional’ clinical variables or patient demographic data and molecular data can result in more statistically significant results than algorithms that use only one or the other. The ability to collect and analyse all three types of data is a particularly advantageous aspect of at least some embodiments of the invention.

### Low Level Analysis

[0103] Program 130a is a low-level analysis module, which carries out steps of background correction, normalisation and probe set summarisation (grouped as step 250 in FIG. 2).

[0104] Background adjustment is desirable because the probe signals (fluorescence intensities) include signal from non-biological sources, such as optical and electronic noise, and non-specific binding to sequences which are not exactly complementary to the sequence of the probe. A number of background adjustment methods are known in the art. For example, Affymetrix arrays contain so-called ‘MM’ (mismatch) probes which are located adjacent to ‘PM’ (perfect match) probes on the array. The sequence of the MM probe is identical to that of the PM probe, except for the 13^{th} base in its sequence, and accordingly the MM probes are designed to measure non-specific binding. A number of known methods use functions of PM-MM or log₂(PM)-log₂(MM) to derive a background-adjusted probe signal, for example the Ideal Mismatch (IM) method used by the Affymetrix MAS 5.0 software (Affymetrix, “Statistical Algorithms Description Document” (2002), Santa Clara, Calif., incorporated herein in its entirety by reference). Other methods ignore MM, for example the model-based adjustment of Irizarry et al [Irizarry, et al. 2003, Biostatistics: 4], or use sequence-based models of non-specific binding to calculate an adjusted probe signal [Wu, et al. 2004, Journal of the American Statistical Association: 99].

[0105] Normalisation is generally required in order to remove systematic biases across arrays due to non-biological variation. Methods known in the art include scaling normalisation, in which the mean or median log probe signal is calculated for a set of arrays, and the probe signals on each array adjusted so that they all have the same mean or median; housekeeping gene normalisation, in which the probe or probe set signals for a standard set of genes (known to vary little in the biological system of interest) in the test sample are compared to the probe signals of that same set of genes in the reference samples, and adjusted accordingly; and quantile normalisation, in which the probe signals are adjusted so that they have the same empirical distribution in the test sample as in the reference samples [Bolstad, et al. 2003, Bioinformatics: 19].

[0106] If the arrays contain multiple probes per probe set, then these can be summarised by program 130a in any one of a number of ways to obtain a probe set expression level, for example by calculating the Tukey bi-weight of the log (PM-IM) values for the probes in each probe set (Affymetrix, “Statistical Algorithms Description Document” (2002)).

### Quality Control

[0107] Once the low-level analysis is completed, the background-corrected, normalised and, if necessary, summarised, data can be processed according to known methods. One such method is described in U.S. 61/247,802 (Van Laar, R.), incorporated herein by reference in its entirety.

### Predictive Analysis

[0108] The test sample proceeds (step 270) to predictive analysis as carried out by statistical classification program 135, which is used to assign a value of a clinically relevant variable to the sample. Such clinical parameters could include:
[0109] The primary tissue of origin for a biopsy of metastatic cancer;
[0110] The molecular similarity to patients who do or do not experience disease relapse with a defined time period after their initial treatment;
[0111] The molecular similarity to patients who respond poor or well to a particular type of therapeutic agent;
[0112] The status of clinico-pathological markers used in disease diagnosis and patient management, including ER, PR, Her2, angiogenesis markers (VEGF, Notch), Ki67, colon cancer markers etc.;
[0113] Possible chromosomal aberrations, including deletions and amplifications of part or whole of a chromosome;
[0114] The molecular similarity to patients who respond poor or well to a particular type of radiotherapy;
[0115] Other methods that may be developed by 3^{rd} party developers and implemented in the system via an Application Programming Interface (API).

[0116] The predictive algorithms used in at least some embodiments of the present invention function by comparing the data from the test sample, to the series of reference samples for which the variable of interest is confidently known, usually having been determined by other more traditional means. The series of known reference samples can be used as individual entities, or grouped in some way to reduce noise and simplify the classification process.

[0117] Algorithms such as the K-nearest neighbour (KNN) algorithm use each reference sample of known type as separate entities. The selected genes/molecules (probe sets) are used to project the known samples into multi-dimensional gene/molecule space as shown in FIG. 3, in which the first three principal components for each sample are plotted. The number of dimensions is equal to the number of genes. The test sample is then inserted into this space and the nearest K reference samples are determined, using one of a range of distance metrics, for example the Euclidean or Mahalanobis distance between the points in the multi-dimensional space. Evaluating the classes of the nearest K reference samples to the test sample and determining the weighted or non-weighted majority class present can then be used to infer the class of the test sample.

[0118] The variation of classes present in the K nearest neighbors can also be used as a confidence score. For example, if 4 out of 5 of the nearest neighbour samples to a given test sample were of the same class (eg Ovarian cancer) the predicted class of the test sample would be Ovarian cancer, with a confidence score of 4/5=80%.

[0119] Other methods of prediction rely on creating a template or summarized version of the data generated from the reference samples of known class. One way this can be done is by taking the average of each selected gene across clinically distinct groups of samples (for example, those individuals treated with a particular drug who experience a positive response compared to those with the same disease/treatment who experience a negative or no response). Once this template has been determined, the class of a test sample can be inferred by calculating a similarity score to one or both templates. The similarity score can be a correlation coefficient.

[0120] Classifiers such as the nearest centroid classifier (NCC), linear discriminant analysis (LDA) or support vector machines (SVM) operate on this basis. LDA and SVM carry out weighting of the genes/molecules when creating the classification template, which can reduce the impact of outlier measurements and spread the classification workload evenly over all genes/molecules selected, rather than relying on a subset to contribute to a majority of the total index score calculated. This can be the case when using a simple correlation coefficient as a predictive index.

### Preparation of Reference Data Set

[0121] To make clinically useful predictions about a specimen of biological material that has been collected from an individual patient, a large database of reference data from patients with the same condition is desirable. The reference samples are preferably processed using similar, more preferably identical, laboratory processes and the reference data are ideally generated using the same type of measurement platform, for example, an oligonucleotide microarray, to avoid the need to match gene identifiers across different platforms.

[0122] The reference data can be generated from tissue specifically collected or obtained for the diagnostic test being created, or from publicly available sources, such as the NCBI Gene Expression Omnibus (GEO: http://www.ncbi.nlm.nih.gov/geo/). Clinical details about each patient can be used to determine whether the finished database accurately reflects the targeted patient population, for example with regard to age/sex/ethnicity and other relevant parameters specific to the disease of interest.

[0123] Clinical annotations can be used for analysis of the same input data at different levels. For example, cancer can be classified using a hierarchy of annotations. These begin at the system level, and then progress to unique tissues and subtypes, which are defined on the basis of pathological or molecular characteristics. The NCI Thesaurus is a source of hierarchical cancer classification information (http://nciterms.nci.nih.gov/NCIBrowser/Dictionary.do).

[0124] Histological annotations can also be used for analysis of the same input data at different levels. For example, tumors can be classified according to their cell-type, e.g. Adenocarcinoma, squamous cell carcinoma, or non-small cell carcinoma.

[0125] All data generated or obtained can be stored in organized flat files or in relational database format, such as Microsoft Access, MySQL, Oracle or Microsoft SQL Server. In this format it can be readily accessed and processed by analytical algorithms trained to use all or part of the data to predict the status of a clinically relevant parameter for a given test sample.

### Presentation of Results to User

[0126] Following execution of classification program 135, the clinical predictions are stored in relational database 112. An interface 111 from the server 110 to database 112 can be used to deliver online and offline results to the end user. Online results can be delivered in HTML or other dynamic file format, whereas portable document format (PDF) can be used for creating permanent files that can be downloaded from the interface 111 and stored indefinitely. Result information in the form of text, HTML or PDF can also be delivered to the user by electronic mail.

[0127] AJAX Web 2.0 technologies can be used to streamline the presentation of online results and general functionality of the Web site.

### Parallel Processing of Data

[0128] A single processor may be used to execute each of the programs 130a, 130b, 135 and any other analysis desired. However, it is advantageous to configure the system 100 such that each analysis module is managed by a separate processor. This allows parallel execution of different user requests to be performed simultaneously, with the results stored in a single centralized relational database 112 and structured file system.

[0129] In this embodiment, illustrated schematically in FIG. 4, each module is programmed to monitor 320 a specific network directory (“trigger directory”). When the system operator requests 305 an analysis, either by uploading a new data file or requesting an additional analysis on a previously uploaded data file, the Web server 110 creates a “trigger file” in the directory 325 being monitored by the processing application. This trigger file contains the operator's unique identifier and the unique name of the data file on which to carry out the analysis.

[0130] When the classification module 135 detects (step 330) one or more trigger files, the contents of the file are read and stored temporarily in memory. The processing application then performs its preconfigured analysis routine, using the data file corresponding to the information contained in the trigger file. The data file is retrieved from the user's data directory (residing on a storage medium in communication with the server or other network-accessible computer) and read into memory in order to perform the requested calculations and other functions. Once the analysis routine is complete, the trigger file is deleted and the module 135 returns to monitoring its trigger directory for the next trigger file.

[0131] Multiple versions of the same classification module 135 can run simultaneously on different processors, all configured to monitor the same trigger directory and write or save their output to the same relational database 112 and file storage system. Alternatively, different modules in addition to classification module 135 could be run on different processors at the same time using the same input data. For processes that take several minutes (eg initial chip processing and Quality Module 130a) this enables analysis requests 305 that are submitted, while an existing request is underway, to be commenced before the completion of the first.

### Example 1

### Identification of Tumor Tissue Origin Markers

### Preparation of Reference Data

[0132] The expO data, NCBI GEO accession number GSE2109, generated by the International Genomics Consortium, was used as a reference data set to train a tumor origin classifier.

[0133] Downloaded CEL files corresponding to the reference samples were pre-processed with the algorithms from Affymetrix MAS 5.0 software and compiled into BRB ArrayTools format, with housekeeping gene normalization applied. Using the associated clinical information from GSE2109, samples were classified at 3 levels of clinical annotation; (1) anatomical system (n=13), (2) tissue (n=29) and (3) subtype (n=295), as shown in FIG. 5. For Level 1 and 2 annotations, a minimum class size of three was set. The mean class sizes for the three levels of sample annotation were: (1) 149, (2) 66 and (3) 6, correlating with number of neighbors used in the kNN algorithm (r²=0.99).

### Data Analysis and Web Service Construction

[0134] Predictive gene expression models were developed using BRB ArrayTools and translated to automated scripts in the R statistical language, incorporating functions from the Bioconductor project [Gentleman, et al. 2004, Genome biology: 5]. The Web service was constructed in the Microsoft ASP.net language (Microsoft Corporation, Redmond, USA; version 3.5) with supporting relational databases developed in Microsoft SQL Server 2008. Statistical analysis of internal cross validation and independent validation series results was performed using Minitab (Minitab Inc. State College Pa., version 15.1.3) and MedCalc (MedCalc Software, Mariakerke, Belgium).

### Selecting a Reference Array for Housekeeping Gene Based Normalization

[0135] Most cells in the human body express under most circumstances, at comparatively constant levels, a set of genes referred to as “housekeeping genes” for their role in maintaining structural integrity and core cellular processes such as energy metabolism. The Affymetrix U133 Plus 2.0 GeneChip (NCBI GEO accession number GPL 570) contains 100 probe sets that correspond to known housekeeping genes, which can be used for data normalization and quality control purposes. For normalization purposes, the 100 housekeeping genes present on a given array within the reference data set were compared to those of a specific normalization array. To select a normalization array for this test, BRB-ArrayTools was used to identify the “median” array from the entire reference data set. The algorithm used was as follows:
[0136] Let N be the number of arrays, and let i be an index of arrays running from 1 to N;
[0137] For each array i, compute the median log-intensity of the array (denoted Mᵢ);
[0138] Select a median M from the [M₁, . . . , M_{N}] values. If N is even, then the median M is the lower of the two middle values;
[0139] Choose as the median array the one for which the median log-intensity Mᵢ equals the overall median M.

[0140] Housekeeping gene normalization was applied to each array in the reference data set. The differences between the log₂ expression levels for housekeeping genes in the array and log₂ expression levels for housekeeping genes in the normalization array were computed. The median of these differences was then subtracted from the log₂ expression levels of all 54,000 probe sets, resulting in a normalized whole genome gene expression profile.

### Selection of Marker Probe Sets for Tumor-Type Discrimination

[0141] To select probe sets for the prediction of tumor origin, ‘one-v-all’ comparisons (t-tests) were performed for each tissue type in the training set (n=29) to identify probe sets which were differentially expressed in each tissue type compared to the rest of the data set. The probe sets identified by this procedure provide a characteristic gene expression signature for tumors originating in each tissue type.

[0142] In each comparison, genes that had a p-value less than 0.01 for differential expression, and a minimum fold change of 1.5 in either direction (up-regulated or down-regulated) were identified as marker probe sets. The analysis was performed using BRB ArrayTools (National Institute of Health, US). The 29 sets of marker probe sets were combined into a single list of 2221 unique probe sets, represented by oligonucleotide primer SEQ ID NOS: 1-24196, which are listed in Table 1.

[0143] The normalized expression data corresponding to these marker probe sets was retrieved from the complete 1942 reference sample×54000 probe set reference data, and this subset was passed to a kNN algorithm at both Level 1 (Anatomical-system, 5NN (nearest neighbors) used) and Level 2 (Tissue, 3NN used) clinical annotation.

[0144] To evaluate whether a smaller set of probe sets would achieve lower misclassification rates, leave-one-out cross validation (LOOCV) of the level 1 and 2 classifiers was performed using multiples of 100 probe sets from 10 to 2220, after ranking in descending order of variance. For each cross-validation test, the percentage agreement between the true and predicted classes was recorded and this is shown in FIGS. 6(a) and 6(b). The maximum classification accuracy obtained was 90% for Level 1 and 82% for Level 2. Reducing the number of marker probe sets used did not significantly improve computation speed.

### Validation Datasets for Prediction of Tumor Origin

[0145] CEL files from 22 independent Affymetrix datasets (all Affymetrix U133 Plus 2.0) containing a total of 1,710 reference samples were downloaded from NCBI GEO and processed as previously described. These datasets represent a broad range of primary and metastatic cancer types, contributing institutes and geographic locations, as detailed in Table 2.

[0146] Of 1,461 primary tumor validation samples that passed all QC checks, the Level 1 and Level 2 classifiers predicted 92% and 82% correctly. Tumor subtype data were not available for most validation datasets; therefore percentage accuracy of this level (3) of the classifier was not calculated. The difference observed between Level 1 and Level 2 classifier accuracy is largely influenced by ovary/endometrial and colon/gastric misclassifications. As with all comparisons of novel diagnostic methods with clinically derived results, the percentage agreement is dependent on multiple factors, including the accuracy of the clinical annotation, integrity of the sample annotations and data files as well as the performance characteristics of the method itself.

[0147] General linear model analysis was performed on the proportion of correct level 1 and level 2 predictions, including tissue type (n=10) and geographic location (n=3) in a regression equation to determine if these variables were factors in overall result accuracy. For Level 1 predictions (anatomical system), no significant difference in result accuracy was observed for tissue type (P=0.13) or geographic location (P=0.86). For Level 2 predictions (tissue type), a marginally significant difference was observed with tissue type (P=0.049) but no significant difference associated with location (P=0.38). The significant difference associated with tissue type at Level 2 is most likely associated with the small sample size of some tumor types.

TABLE 2
Independent primary tumor datasets used for validation of the tumor origin classifier.
Percentage agreement with the original (clinically-determined) diagnosis.

| | | | | | | Level 2 |
|---|---|---|---|---|---|---|
| | | | | | Level 1 | classifier % |
| | | | | | classifier % | agreement |
| | | | | % samples | agreement | with |
| Cancer | | NCBI GEO | | passing all | with clinical | clinical |
| Type | Origin | Dataset ID | samples | QC checks | diagnosis | diagnosis |
| Breast | Boston, MA, USA | GSE5460 | 125 | 95% | 100% | 99% |
| Breast | San Diego, CA, | GSE7307 | 5 | 100% | 100% | 100% |
| | USA | | | | | |
| Colon | Singapore | GSE4107 | 22 | 91% | 100% | 90% |
| Colon | Zurich, Switzerland | GSE8671 | 64 | 100% | 100% | 69% |
| Gastric | Singapore | GSE15460 | 236 | 96% | 89% | 44% |
| Gastric | Singapore | GSE15459 | 200 | 95% | 96% | 54% |
| Liver | Taipei, Taiwan | GSE6222 | 13 | 85% | 91% | 91% |
| Liver | Cambridge, MA, | GSE9829 | 91 | 82% | 99% | 99% |
| | USA | | | | | |
| Lung | St Louis, MO, USA | GSE12667 | 75 | 99% | 89% | 88% |
| Lung | Villejuif, France | GSE10445 | 72 | 57% | 93% | 95% |
| Melanoma | Tampa, FL, USA | GSE7553 | 40 | 100% | 68% | 65% |
| Melanoma | Durham, NC, USA | GSE10282 | 43 | 100% | 65% | 84% |
| Ovarian | Melbourne, | GSE9891 | 285 | 100% | 99% | 96% |
| | Australia | | | | | |
| Ovarian | Ontario, Canada | GSE10971 | 37 | 97% | 100% | 72% |
| Prostate | Ann Arbor, MI, | GSE3325 | 19 | 95% | 89% | 89% |
| | USA | | | | | |
| Prostate | San Diego, CA, | GSE7307 | 10 | 100% | 90% | 90% |
| | USA | | | | | |
| Soft tissue | Paris, France | M-EXP- | 16 | 100% | 75% | 75% |
| | | 964* | | | | |
| Soft tissue | New York, NY, | GSE12195 | 83 | 99% | 98% | 98% |
| | USA | | | | | |
| Thyroid | Columbus, OH, | GSE6004 | 18 | 67% | 100% | 100% |
| | USA | | | | | |
| Thyroid | Valhalla, NY, USA | GSE3678 | 14 | 93% | 92% | 100% |
| | | | Total: 1468 | Mean: 92% | Mean: 92% | Mean: 85% |

*Dataset obtained from EBI ArrayExpress (http://www.ebi.ac.uk/microarray-as/ae/)

Agreement of the Level 2 classifier increases to 90% if colon/rectum misclassifications are considered as correct.

### A Three-Stage Classifier for Prediction of Tumor Origin

[0148] Reflecting the nature of existing diagnostic workflows for metastatic tumors, a novel 3-tiered approach to predicting the origin of a metastatic tumor biopsy was developed. For each test sample analysed, 3 rounds of kNN classification were performed, using the 3 levels of annotation previously described, i.e. (1) anatomical system, (2) tissue and (3) histological subtype, with k=5, 3 and 1 respectively. The decreasing value of k with increasing specificity of tissue annotation was chosen based on the decreasing mean class size at each tier of the classifier, with which it is highly correlated (r²=0.99).

[0149] A measurement of classifier confidence was generated for Level 1 (k=5) and Level 2 (k=3) results by determining the relative proportion of a test sample's 5 or 3 neighbors, respectively, that contribute to the winning class. The Level 3 prediction (k=1) identifies the specific individual tumor from the reference database that is closest to the test sample, in multi-dimensional gene expression space. As such, it is not possible to calculate a weighted confidence score for this level of classifier.

[0150] To determine the internal cross validation performance of the reference data and 3-tier algorithm, leave-one-out cross validation (LOOCV) was performed on the reference data set, using annotation levels 1 and 2. Results were tallied and overall percentage agreement and class-specific sensitivities and specificities were determined. The R/Bioconductor package “class” was used for kNN classification and predictive analyses.

### Example 2

### Identification of Breast Cancer Prognostic Markers

[0151] Two training data sets from untreated breast cancer patients_(NCBI GEO accession numbers GSE4922 and GSE6352), including a total of 425 samples hybridized to Affymetrix HG-U133A arrays (NCBI GEO accession number GPL96) were downloaded in CEL file format. Clinical data were available for age, grade, ER status, tumor size, lymph node involvement, and follow-up data for up to 15 years after diagnosis were also available. An independent validation data set, consisting of samples from 128 Tamoxifen-treated patients hybridized to Affymetrix HG-U133Plus2 arrays with age, grade, ER status, nodal involvement and tumor size data, was also obtained.

[0152] A semi-supervised method substantially in line with the method described by Bair and Tibshirani [Bair, et al. 2004, PLoS Biol: 2], incorporated herein in its entirety by reference, was used, with algorithm settings of k=2 (number of principal components for the “supergenes”), p-value threshold of 0.001 for significance of a probe set being univariately correlated with survival, 10-fold cross-validation, and age, grade, nodes, tumor size and ER status used as clinical covariates. The method identified 200 prognostic marker probe sets, represented by oligonucleotide primer SEQ ID NOS: 171-270 and 25777-27864, shown in Table 3, and gave the following model for risk of recurrence (Formula I):

$$P I = {\sum }_{i = 1}^{200} {w}_{i} {x}_{i} - 0.139601 ( grade ) + 0.64644 ( ER ) + 0.938702 ( nodes ) + 0.010679 ( size ( mm ) ) + 0.23595 ( age ) + 0.243639$$

[0153] In Formula I, wᵢ is the weight of the i^{th} probe set, xᵢ is its log expression level, and PI is prognostic index.

[0154] FIGS. 7(a) and 7(b) show Kaplan Meier analysis of 10-fold cross validation predictions made for the 425-sample training set. Log rank tests were used to compare the survival characteristics of the two risk groups identified.

[0155] Evaluation of the cross-validation predictions made for the training set revealed a highly statistically significant difference in the survival characteristics of the high and low risk groups. Of the 425 patients, 297 (70%) were classified as high-risk and 128 (30%) as high risk. The p-value of the Kaplan Meier analysis log-rank test was P<0.0001 and the hazard ratio of the classifier was 3.75 (95% confidence interval 2.47 to 5.71).

[0156] In the training set, 85% of patients classified as low risk were disease-recurrence free at 5 years after treatment. In the high-risk group, 41% of patients experienced disease recurrence within this same time period.

[0157] FIGS. 8(a) and 8(b) show survival characteristics of the high and low risk groups for the independent validation data set. The groups identified in this cohort are more similar to each other up to 3 years after diagnosis. This is likely attributable to the use of Tamoxifen in these patients. After this time point survival characteristics are significantly different.

[0158] Kaplan Meier analysis and log-rank testing was performed on the independent validation set. The P-value associated with the log rank test was P=0.0007. A hazard ratio of 4.90 (95% confidence interval 1.96 to 12.28) was observed. These figures indicate that the classifier was able to stratify the patients into two groups with markedly different survival characteristics.

[0159] Overall those individuals in the high-risk group are 4.9 times more likely to experience disease recurrence than those in the low risk group in the 10 years after diagnosis. Three quarters of the independent validation patients are classified as low risk (n=97) and of these, 90% are recurrence-free after 5 years.

[0160] Additionally, multivariate Cox Proportional Hazards analysis was performed on the 128 sample independent validation set. Two models were built and tested, one including the clinical variables only, and the other including the clinical variables and classifier prediction variable (high/low risk). The significance level of the clinical-only model was P=0.0291, whilst for the clinical+classifier model it was P=0.0126. The classifier remained independently prognostic in the second model (P=0.048).

[0161] These results indicate that the classifier (comprised of 200 genes+5 clinical variables) is able to stratify patients into high and low risk groups for disease recurrence. Furthermore, the stratification of patients is more statistically significant than the use of clinical variables alone. The prognostic significance of the classifier has been evaluated in patients who do and do not receive Tamoxifen treatment following their initial diagnosis and surgical procedure.

[0162] The 200 gene set can also be used to stratify breast cancer patients into high and low risk for disease recurrence groups without the requirement of considering the patients clinical variables. In this version of the prognostic algorithm, samples are classified as low risk if their prognostic index (i.e. sum of percentile-rank values*gene weights) is below −0.38 or high risk if they are above this threshold, as shown in FIG. 11. This threshold corresponded to an 8.5% false-negative rate for 5-year RFS in the subset of training series patients who did not receive systemic therapy.

[0163] FIG. 11 also shows the relationship between tumor grade and the prognostic index, with 97% of grade 3 tumors are classified as high risk and 54% of grade 1 tumors are classified as low risk. Sixty-nine percent of grade 2 tumors (representing 54% of the complete training series) were classified as high risk. Chi square test of tumor grade vs. risk group was significant at P<0.001. The difference in mean tumor size was significantly different between risk groups; low risk group was 19 mm (standard deviation 10 mm), high risk: 25 mm (12 mm), P<0.0001.

[0164] Kaplan Meier analysis and log rank testing was performed on the cross-validated training series risk groups and a statistically significant difference in recurrence-free survival was observed between the high and low risk group (P<0.001, HR: 4.2 95% CI: 3.0 to 5.8). At the 10-year follow up point, RFS for the low risk group (N=161, 33.8%) was 87%, compared to 56% for high-risk classified patients (N=316, 66.2%). Of the 118 patients who developed disease recurrence within 5 years, 104 (88%) were assigned to the high-risk group. An additional 32 individuals relapsed between 5 and 10 years of follow-up, with 26 being classified as high risk by the signature (81%).

[0165] Details of the training and validation series used to create and evaluate the 200-gene only model are shown in Table 4, in addition to the results of the multivariate Cox Proportional Hazards analysis performed on each series.

TABLE 4
Training and validation series, and Cox proportional hazards analysis.

| Series | Description | Cox Proportional Hazards Analysis | | | | |
|---|---|---|---|---|---|---|
| Training: | | Covariate | P (RF) | HR (95% CI) | | |
| GSE4922 | ER+/ER−, | Age | 0.42 | 1.01 (0.99 to 1.02) | | |
| Ivshina/ | N0/N1, | ER+ | 0.58 | 1.18 (0.65 to 2.16) | | |
| Miller [Ivshina, | Systemic | Grade | 0.059 | 1.40 (0.99 to 1.97) | | |
| et al. 2006, | therapy, | Size (mm) | 0.10 | 1.01 (1.00 to 1.02) | | |
| Cancer Res: | tamoxifen | Node + | 0.0001 | 2.79 (1.67 to 4.66) | | |
| 66], | only or no | Endocrine Tx | 0.28 | 0.73 (0.42 to 1.28) | | |
| GSE6532 | adjuvant | Chemo Tx | 0.0032 | 0.35 (0.18 to 0.70) | | |
| Loi/ | therapy. | 200-gene sig | 0.0001 | 3.14 (1.80 to 5.49) | | |
| Sotiriou [Loi, | | | | | | |
| et al. 2007, J | | | | | | |
| Clin Oncol: | | | | | | |
| 25] N = 477 | | | | | | |
| Validation 1: | | Covariate | P (DM) | HR (95% CI) | P (OS) | HR (95% CI) |
| GSE7390 | ER+/−, N0, | Age | 0.35 | 1.022 (0.98 to 1.07) | 0.46 | 1.02 (0.97 to 1.06) |
| Desmedt/ | <61 yrs, | ER+ | 0.54 | 0.81 (0.40 to 1.62) | 0.033 | 0.48 (0.25 to 0.94) |
| Sotiriou[Desmedt, | untreated, | Grade | 0.73 | 1.11 (063 to 1.95) | 0.23 | 0.74 (0.45 to 1.21) |
| et al. | ≦5 cm | Size (mm) | 0.092 | 1.35 (0.95 to 1.92 | 0.074 | 1.35 (0.97 to 1.87) |
| 2007, Clinical | | 200-gene sig | 0.0046 | 4.37 (1.58 to 12.08) | 0.0053 | 3.31 (1.43 to 7.64) |
| Cancer | | | | | | |
| Research: | | | | | | |
| 13] N = 198 | | | | | | |
| Validation 2: | | Covariate | P | HR (95% CI) | | |
| GSE11121 | ER+/−, | Grade | 0.033 | 1.93 (1.057 to 3.51) | | |
| Schmidt/ | untreated, | Size (mm) | 0.79 | 1.044 (0.75 to 1.45) | | |
| Gehrmann [Schmidt, | population- | 200-gene sig | 0.056 | 2.63 (0.98 to 7.055) | | |
| et al. | based, N0. | | | | | |
| 2008, Cancer | | | | | | |
| Res: 68] | | | | | | |
| N = 200 | | | | | | |
| Validation 3: | | Covariate | P (DM) | HR (95% CI) | P (DS) | HR (95% CI) |
| GSE1456 | ER+/−, | Grade | 0.19 | 1.47 (0.83 to 2.64) | 0.34 | 1.40 (0.70 to 2.80) |
| Pawitan/ | population- | 200-gene sig. | 0.055 | 2.58 (0.98 to 6.67) | 0.025 | 4.67 (1.23 to 17.81) |
| Bergh | based, 126 | | | | | |
| [Pawitan, et | adjuvant tx. | | | | | |
| al. 2005, | | | | | | |
| Breast | | | | | | |
| Cancer Res: | | | | | | |
| 7]) N = 159 | | | | | | |
| Validation 4: | | Covariate | P (DM) | HR (95% CI) | | |
| GSE9195, | ER+, | Age | 0.22 | 0.97 (0.93 to 1.019) | | |
| GSE6532 | adjuvant | Grade | 0.74 | 0.89 (0.46 to 1.72) | | |
| Loi/ | tamoxifen | Nodes | 0.94 | 0.96 (0.38 to 2.38) | | |
| Sotiriou [Loi, | treated, | Size | 0.0075 | 1.49 (1.11 to 1.98) | | |
| et al. 2007, J | N0/N1, | 200-gene | 0.019 | 6.51 (1.37 to 30.86) | | |
| Clin Oncol: | ≦5 cm | sig. | | | | |
| 25] | | | | | | |
| Validation 5: | | Covariate | P (DM) | HR (95% CI) | P (OS) | HR (95% CI) |
| NKI 295 (Van | ER+/− | ER+ | 0.18 | 0.74 (0.47 to 1.16) | 0.057 | 0.51 (0.32 to 0.82) |
| De Vijver et | untreated, | Node+ | 0.39 | 0.84 (0.56 to 1.25) | 0.63 | 0.90 (0.57 to 1.40) |
| al [van de | Stage I/II, | 200-gene sig | <0.0001 | 2.92 (1.77 to 4.80) | <0.0001 | 3.91 (2.06 to 7.42) |
| Vijver, et al. | <53 years | | | | | |
| 2002, N Engl | old; N0/N1. | | | | | |
| J Med: 347]* | | | | | | |
| N = 295 | | | | | | |

[0166] To further assess the clinical significance of 200-gene signature, differences in OS and DSS data for the high and low risk groups from validation series 1 and 3 (respectively) were analyzed. This showed that patients classified as low risk experienced high 10 years OS (90%) and 8.5-years DSS (95%). Kaplan Meier analysis and log rank testing of the risk groups was significant for DSS (P=0.003 HR: 3.73, 95% CI: 2.11 to 6.61) and OS (P=0.002, HR: 6.97, 95% CI: 3.35 to 14.5). Finally, OS of patients from validation series 5 classified as high risk (by the 99 gene model) was again found to be significantly poorer than those classified as low risk (P<0.0001, HR: 4.81, 95% CI: 3.07 to 7.52). In this series, 88% of low risk patients were alive at the 10-years follow-up mark.

[0167] Multivariate CPH was performed on the training and validation series using all available clinico-pathological covariates, to further assess the clinical significance of the 200-gene algorithm (Table 3). Covariate-adjusted recurrence-free survival hazard ratios for the training series, validation series 1 and 4 were statistically significant; 3.14 (P=0.0001), 4.37 (P=0.0046) and 6.51 (P=0.019), respectively. The 200-gene signature was marginally significant in validation series 2 (P=0.056) and 3 (P=0.055). Analysis of validation series 5 revealed the 99-gene subset classifier to be independently significant for both DMFS and OS (P<0.0001). In each CPH analysis the gene expression classifier was the strongest predictor of outcome.

[0168] Analysis of untreated, N0 patients (validation series 1 and 2) revealed the sensitivity and specificity of the assay for predicting 10-year DMFS to be 87.8% (95% CI: 78.7% to 94.0%) and 41.8% (36.0% to 47.8%), respectively. The positive and negative predictive values (PPV/NPV) of the classifier in this clinical setting were 30.5% (95% CI: 24.7% to 36.8%) and 92.2% (95% CI: 86.1% to 96.2%), respectively. The sensitivity and specificity of the assay for 10-year OS (based on validation series 1 only) was 89.2% (95% CI: 74.5% to 97/0%) and 46.1% (95% CI: 37.2% to 55.1%), respectively. PPV and NPV for OS were 32.4% (95% CI: 23.4% and 42.3%) and 93.4% (95% CI: 84% to 96.2%), respectively.

### Example 3

### Identification of Colon Tumor Prognostic Markers

[0169] To identify individual genes with expression patterns significantly associated with prognosis and train an algorithm to predict colon cancer recurrence, a database of clinical and gene expression data was compiled from a previously described patient series [Smith, et al. 2009, Gastroenterology: 138]. This comprised of 232 whole-genome Affymetrix U133 Plus 2.0 profiles that were generated from fresh-frozen biopsies taken from colon cancer patients diagnosed with stage 1-4 disease (NCBI GEO: GSE17538). These patients were treated at either the Vanderbilt Medical Centre (Nashville, Tenn., USA) or the H. Lee Moffittt Cancer Center (Tampa, Fla., USA) and are described in detail in the original publication.

[0170] To objectively assess the significance of the prognostic algorithm developed, an independent validation series of 163 Affymetrix U133 Plus 2.0 profiles from stage 2 and 3 colon cancer patients from a different previously published study was used [Jorissen, et al. 2009, Clinical Cancer Research: 15]. This clinical validation series (NCBI GEO ID: GSE14333) represented consecutive colon cancer patients who were treated at The Peter MacCallum Cancer Centre, Westmead Hospital and the Royal Melbourne Hospital (Australia) and the H. Lee Moffitt Cancer Center (USA). Patients were untreated prior to surgery and data were available for age at diagnosis, gender, tumor grade, stage, and recurrence-free survival. A summary of training and validation series demographics is shown in Table 5.

TABLE 5
Patient demographics of the colon cancer series used for gene selection,
algorithm training and independent validation

| | | | Independent | |
|---|---|---|---|---|
| | Training series | | validation series | |
| NCBI GEO ID | GSE17538 | | GSE14333 | |
| Contributing institutes | Vanderbilt Medical | | The Peter | |
| | Center (Nashville, TN) | | MacCallum Cancer | |
| | & H. Lee Moffit | | Centre, Westmead | |
| | Cancer Center | | Hospital, &Royal | |
| | (Tampa, FL) | | Melbourne Hospital | |
| | | | (Australia) | |
| Number of samples | 232 | | 60 | |
| Age (years), mean +/− | 64 +/− 13.4 | | 68 +/− 13.7 | |
| SD | | | | |
| Stage 1, n (%) | 28 | (12%) | — | |
| Stage 2, n (%) | 72 | (31%) | 33 | (55%) |
| Stage 3, n (%) | 76 | (33%) | 27 | (45%) |
| Stage 4, n (%) | 56 | (24%) | — | |
| Gender: Female, n (%) | 110 | (47%) | 28 | (47%) |
| Gender: Male, n (%) | 122 | (53%) | 32 | (53%) |
| Adjuvant chemotherapy | — | | 22 | (37%) |
| Adjuvant radiotherapy | — | | 1 | (2%) |
| Median follow-up/ | 30 | (0 to 210) | 37 | (2 to 85) |
| survival (months), | | | | |
| (range) | | | | |
| No. recurrences, n (%) | 55 | (23%) | 16 | (17%) |

| | | | |
|---|---|---|---|
| No. deaths, n (%) | 93 | (40%) | n/a |

[0171] As the reproducibility of gene expression data can be influenced by a number of factors, including the method of tissue preservation and technical factors such reagent batches and scanning equipment settings, an additional series of replicated hybridizations were obtained [Bowtell 1999, Nat Genet: 21; Mutter, et al. 2004, BMC Genomics: 5]. These came from the multi-center Microarray Quality Control study (MAQC) and were used to assess the stability of the prognostic signature between analysis sites (NCBI GEO ID: GSE5350) [Shi, et al. 2006, Nature biotechnology: 24]. Affymetrix hybridizations of four pools of cell-line RNA were performed five times in six different laboratories, resulting in 120 CEL files.

[0172] All Affymetrix CEL files were processed using MASS normalization and background correction. Probes with low intensity (<100) were excluded and each chip was median centered based on the expression of the internal 100—probe ‘reference set’, a series of probes selected by Affymetrix based on their low variation between multiple tissue types. Although the authors of the original studies reportedly examined the quality of their hybridizations prior to analysis, all genomic data were re-analyzed using the ChipDX Quality Module, which was specifically designed for diagnostic applications. This multi-step quality system evaluates factors such as non-specific background binding, normalization factors, signal-to-noise ratios and replicate probe variation. GeneChips flagged by the ChipDX Quality Module were excluded from the classifier evaluation analyses.

[0173] A modified version of the method described by Bair and Tibshirani [Bair and Tibshirani 2004, PLoS Biol: 2] was used to develop and train a predictive algorithm capable of stratifying patients into categories corresponding to low or high risk of disease recurrence. This approach uses CPH models to relate survival time to two “metagene” expression levels. These “metagenes” are the first two principal component linear combinations of the corresponding genes found to be significantly associated with recurrence, independent to clinical covariates. The prognostic significance of each gene was assessed using multivariate CPH regression models that included age at diagnosis, tumor grade and clinical staging. In this study, genes with patterns of expression that were significant at P<0.002 were used to compute the principal components and regression coefficients (weights).

[0174] To apply the classifier on data from a patient whose gene expression profile is described by a vector ‘x’ of log expression levels, the two principal components are computed by combining x with the weights of each linear combination. The weighted average of these two principal component values is then calculated, resulting in a value referred to as the ‘prognostic index’. A high prognostic index corresponds to an increased hazard of colon cancer recurrence. The classification threshold was set based on the 50^{th} percentile of training series indices, which were calculated using leave-one-out cross validation (LOOCV).

[0175] After completing this process on the 232—sample training series, expression data for genes selected in 20% or more of the cross validation rounds were converted to percentile-rank values (range 0.00-100.00) and used to retrain the predictive algorithm. Training-series risk group predictions from both log-intensity and percentile-rank versions of the algorithm were compared. Finally, the rank-based prognostic algorithm was applied to data from the independent validation series of patients with stage 2 or 3 colon cancer.

[0176] Kaplan Meier analysis and log-rank testing was used to evaluate the differences between the predicted risk groups in the training series for 5-year disease-free survival (DFS) and disease-specific survival (DSS). The independent validation series was evaluated for 5-year DFS only as DSS data was not available. Multivariate Cox Proportional Hazards (CPH) analysis was performed to determine the independence of the prognostic signature in the presence of clinical covariates. For all tests, p-values<0.05 were considered significant.

[0177] Gene expression analysis was performed using R (www.r-project.org), Bioconductor [Gentleman, et al. 2004, Genome biology: 5] and BRB ArrayTools [Simon, et al. 2007, Cancer Inform: 3]. Statistical analysis of the prognostic index and risk group predictions were carried out using MedCalc (MedCalc Inc. Belgium). A custom R-script was created to encapsulate the diagnostic algorithm created and was incorporated into to the ChipDX online analysis system; developed with R, Bioconductor, Microsoft ASP.NET and SQL Server (Microsoft Corporation, WA).

### Identification of Recurrence-Associated Gene Expression Patterns

[0178] Multivariate analysis of the 232-sample stage 1-4 training series successfully identified a set of 163 probes, significantly associated with colon cancer recurrence, independent to age, grade and stage. An annotated list of the 163 probes, represented by oligonucleotide primer SEQ ID NOS: 1-170 and 24197-25776, is provided in Table 6. The gene set was compared to prognostic colon cancer signatures published by Smith et al (34 genes) [Smith, et al. 2009, Gastroenterology: 138] and Jorissen et al (128 genes) [Jorissen, et al. 2009, Clinical Cancer Research: 15]. No overlap was found between all three signatures, or between the Smith and Jorissen signatures. Seven genes were found in common between the Jorissen signature and the 163 probe set identified in this study; AKAP12, DCBLD2, FN1, SPARC, SPP1, THBS2 and VCAN. The hypergeometric probability of this overlap occurring by chance is <1.40×10⁻⁷.

[0179] To explore the biological functions of the genes selected from the prognostic signature, Ingenuity Pathway Analysis software was used (www.ingenuity.com). A significant overlap was detected with several relevant gene families, including colon cancer progression (e.g. FN1, IGBP3, PLAUR and TIMP1; P=0.00052), tumor cell apoptosis (e.g. BID, TNFRSF21, PHLDA1 and NOTCH1; P=1.46×10-6) and cell proliferation (e.g. CTGF, SPP1, FOLR1 and SPARC). Enrichment of genes from the IGF-1 signaling and VDR/RXR activation canonical pathways (P=7.82×10⁻⁴ and P=3.85×10⁻³ respectively) was also found. These molecular pathways have been implicated in colon cancer development and progression [Khandwala, et al. 2000, Endocr Rev: 21][Wactawski-Wende, et al. 2006, N Engl J Med: 354].

### Analysis of Independent Clinical Validation Series

[0180] The trained 163-probe algorithm was then applied to data from an independent series of 33 stage 2 and 27 stage 3 colon cancer patients, not involved in the gene selection or algorithm development process. Thirty-five (58%) of these patients were classified as low risk (i.e. prognostic index<50^{th} percentile of cross-validated training series indices; −0.104). Kaplan Meier analysis and log rank testing of the two risk groups, containing both stage 2 and 3 patients, revealed a significant difference in 5-year DFS (P=0.021, HR: 3.19 95% CI: 1.18 to 8.63).

[0181] Kaplan Meier analysis of risk groups stratified by gene expression risk group and clinical staging was then performed, resulting in a significant difference in DFS for stage 2 patients (P=0.0031) and approaching significance for stage 3 patients (P=0.057). Notably, no low-risk stage 2 patient from this series experienced disease recurrence for (up to) 5 years.

[0182] As the use of chemotherapy for patients with stage 2 and 3 cancer remains controversial [Quasar Collaborative, et al. 2007, Lancet: 370], there is a need for improved methods of risk assessment. In this study, multivariate survival models were applied to clinical and gene expression data to identify a prognostic signature for stage 2 and 3 colon cancer. This was used to create a robust diagnostic tool that may ultimately assist clinicians in tailoring personalized treatment options, in conjunction with the clinical staging system.

[0183] The ‘meta-gene’ classification algorithm was developed from a multi-center series of stage 1-4 colon cancer patients and then independently validated on a separate series of stage 2 and 3 colon cancer patients. In the case of patients with stage 2 disease, the assay is able to identify those who are at low risk of disease recurrence; i.e. 89% recurrence-free survival (RFS) in the training series and 100% RFS in the validation series, for up to 5 years following diagnosis. By comparison, high-risk stage 2 patients experience a 24-27% lower rate RFS, suggesting that adjuvant therapies should be considered for patients assigned to this risk group. Stratification of stage 2 patients also corresponded to a significant difference in DSS in the training series, confirming the clinical significance of the assay.

[0184] Patients diagnosed with stage 3 colon cancer are commonly treated with adjuvant chemotherapy, yet relapse is still observed in approximately 40% of cases [Andre, et al. 2004, N Engl J Med: 350]. Genomic stratification of stage 3 patients in this study resulted in groups with significant differences in RFS, with those patients classified as high risk experiencing an extremely poor 5-year RFS rate of 43% (training series) and 26% (validation series). As such, a patient with stage 3 disease and the high-risk gene expression signature may benefit from a more aggressive treatment regimen, possibly including targeted or experimental therapies, such as bevacizumab or panitumumab [Hurwitz, et al. 2004, N Engl J Med: 350][Seront, et al. Cancer Treat Rev: 36 Suppl 1].

[0185] The signature developed in this study differs from previous groups in several ways. Firstly, it was developed exclusively using a training series of gene expression and clinical data derived from human colon tumors, representing all major stages of progression. Tumors of the rectum were intentionally excluded as they are increasingly recognized as a distinct category with different origins and treatment options [Konishi, et al. 1999, Gut: 45]. Each gene in the signature is individually associated with outcome independent to traditional prognostic variables. The algorithm trained on these data uses robust gene expression rank values, rather that log scale intensities which are more susceptible to inter- and intra-laboratory technical variation. Finally, the prognostic index is a continuous variable, positively correlated with increased risk of colon cancer recurrence and capable of stratifying patients into risk groups that are statistically and clinically significant, for up to 5-years following diagnosis.

[0186] [Bair and Tibshirani 2004, PLoS Biol: 2; Gentleman, et al. 2004, Genome biology: 5; Khandwala, et al. 2000, Endocr Rev: 21; Simon, et al. 2007, Cancer Inform: 3] [Wactawski-Wende, et al., 2006, Journal/N Engl J Med, 354] [Quasar Collaborative, et al., 2007, Journal/Lancet, 370] [Andre, et al., 2004, Journal/N Engl J Med, 350] [Hurwitz, et al., 2004, Journal/N Engl J Med, 350] [Seront, et al., Journal/Cancer Treat Rev, 36 Suppl 1][Konishi, et al. 1999, Gut: 45]

### Example 4

### Identification of Non-Small-Cell Lung Cancer Prognostic and Adjuvant Chemotherapy Benefit Predictive Markers

[0187] Adenocarcinoma is the most common form of non-small cell lung cancer (NSCLC), a category that represents 85% of all lung cancers. Disease stage is strongly associated with outcome and commonly used to determine adjuvant treatment eligibility. Improved and integrated methods for predicting outcome and adjuvant chemotherapy (ACT) benefit have the potential to lower over and under treatment rates [Pisters, et al. 2007, Journal of Clinical Oncology: 25].

[0188] Subramanian and Simon recently compared 16 studies describing the development of prognostic gene expression signatures for non-small cell lung cancer (NSCLC), published between 2002 and 2009 [Subramanian, et al. Journal of the National Cancer Institute: 102]. A standard set of evaluation criteria was applied to each, assessing study design, statistical validation, result presentation and demonstrable improvement over existing treatment guidelines. It was concluded that none were ready for clinical application as none significantly improved upon a simple clinical formula based on patient age and tumor size [Subramanian, et al. Nat Rev Clin Oncol: 7].

[0189] Using a unique randomized controlled clinical trial design, Zhu et al [Zhu, et al. 2010, Journal of Clinical Oncology: 28] identified a set of 15 genes with the ability to stratify patients into categories with significant differences in their outcome and adjuvant chemotherapy benefit. Multiple histological subtypes were present in the training series used to develop the gene signature. While the prognostic significance of the 15-gene set was validated in several previously published independent series of NSCLC patients, only cross-validation or ‘resubstitution’ results were presented to verify their predictive ability. A number of statistical guidelines have described the potential pitfalls of this approach [Simon 2005, J Clin Oncol: 23; Subramanian and Simon 2010, Journal of the National Cancer Institute: 102].

[0190] The goal of this analysis was to perform meta-analysis of publicly available gene expression data from patients with lung adenocarcinoma to develop and independently validate complimentary algorithms for classifying patients into groups with significant differences in outcome and ACT-benefit. In addition, genomic indicators for select genetic mutations involved in lung cancer development and progression were also sought.

[0191] Genomic and clinical data from The Directs Challenge Consortium for Molecular classification of Lung Adenocarcinoma series [Shedden, et al. 2008, Nat Med: 14], representing 442-patients from six treatment centres, were used to identify genes with robust patterns of expression associated with outcome and ACT-benefit. Patients who received adjuvant systemic or radio-therapy were excluded from training series A, leaving 329 patients with stage 1a-3b disease, as summarized in Table 7.

TABLE 7
Clinicopathological characteristics of the lung adenocarcinomapatients used
in this study.

| | Prognostic signature | | Chemotherapy-response signature | |
|---|---|---|---|---|
| | Training Series | Validation Series | Training Series | Validation Series |
| Variable | A (n = 329) | A (n = 327) | B (n = 88) | B (n = 90) |
| Age: Median (SD) | 65 (12) | 64 (10) | 62 (10) | 63 (8) |
| Gender: Female, | 156 (47%), | 178 (54%), | 51 (58%), 39 | 23 (26%), 67 |
| Male | 173 (53%) | 149 (46%) | (42%) | (74%) |
| Stage: | 230 (70%), 59 | 201 (62%), 66 | 39 (44%), 27 | 45 (50%), 45 |
| I/II/III/IV/unknown | (18%), 40 (12%), | (20%), 60 (18%), | (31%), 21 (24%), | (50%), 0 (0%), 0 |
| | 0 (0%), 0 (0%) | 0 (0%), 0 (0%) | 1 (1%), 0 (0%) | (0%), 0 (0%) |
| Stage I: A/B | 108, 122 | 93, 97 | 5, 34 | — |
| Stage II: A/B | 48, 11 | 16, 44 | 25, 3 | — |
| Grade: | 48 (15%), 161 | 22 ( ), 36 ( ), 48 ( ), | 10 (11%), 40 | — |
| 1/2/3/unknown | (49%), 116 (35%), | | (45%), 36 (41%), | |
| | 4 (1%) | | 2 (2%) | |
| Histological | Adenocarcinoma: | Adenocarcinoma: | Adenocarcinoma: | Adenocarcinoma: |
| subtype | 329 (100%) | 327 (100%) | 88 (100%) | 28 (31%), Large |
| | | | | cell carcinoma: 10 |
| | | | | (11%), Squamous |
| | | | | cell carcinoma: 52 |
| | | | | (58%) |
| Smoking history | Never: 33 (10%) | Never: 1 (<1%) | Never: 14 (16%) | — |
| | Former: 181 | Former: 21 (6%) | Former: 65 (74%) | |
| | (55%) | Unknown: 325 | Current: 7 (8%) | |
| | Current: 25 (8%) | (93%) | Unknown: 2 (2%) | |
| | Unknown: 90 | | | |
| | (27%) | | | |
| Radiotherapy | 0 (0%) | 20 (6%) | 45 (51%) | 0 (0%) |
| Chemotherapy | 0 (0%) | 0 (0%) | 88 (100%) | 50 (56%) |
| Original | [Shedden, et al. | [Shedden, et al. | [Shedden, et al. | [Zhu, et al. 2010, |
| publication(s): | 2008, Nat Med: | 2008, Nat Med: | 2008, Nat Med: | Journal of Clinical |
| | 14] | 14] | 14] | Oncology: 28] |
| | | [Takeuchi, et al. | | |
| | | 2006, Journal of | | |
| | | Clinical Oncology: | | |
| | | 24] | | |
| | | [Zhu, et al. 2010, | | |
| | | Journal of Clinical | | |
| | | Oncology: 28] | | |
| | | [Bild, et al. 2006, | | |
| | | Nature: 439] | | |
| Genomic | Affymetrix | Agilent custom | Affymetrix | Affymetrix |
| platform: | GeneChip U133A | array: 82 (25%) | GeneChip U133A | GeneChip U133A |
| | | Affymetrix | | |
| | | GeneChip: U95A: | | |
| | | 155 (47%), | | |
| | | U133A: 35 (11%), | | |
| | | U133 Plus 2.0: 55 | | |
| | | (17%) | | |
| NCBI Gene | n/a¹ | GSE11969, | n/a¹ | GSE14814 |
| Expression | | GSE14814, | | |
| Omnibus ID(s) | | GSE3141 and¹ | | |
| Disease specific | 120 (36%) | 144 (44%) | 47 (53%) | 27 (30%) |
| death within 5 | | | | |
| years | | | | |

“—” = not available.
¹Data available at: https://array.nci.nih.gov/caarray/project/details.action?project.experiment.publicIdentifier=jacob-00182

[0192] To independently evaluate the prognostic significance of the algorithm, a multi-institute, multi-platform validation series of stage I-II large lung adenocarcinoma patients was compiled from three previously published studies [Takeuchi, et al. 2006, Journal of Clinical Oncology: 24; Bild, et al. 2006, Nature: 439; Bhattacharjee, et al. 2001, Proceedings of the National Academy of Sciences of the United States of America: 98]. These were combined with patients who received radiotherapy-only from the Directors Challenge study for a total of 334 patients (validation series A).

[0193] To develop a predictive signature for ACT-benefit, data from the 88 patients who were part of the NIH Director's Challenge series and received adjuvant chemotherapy were compiled as training series B. To validate the signature in patients not involved in the gene selection or algorithm training process, data from 90 patients enrolled in a randomized controlled trial of adjuvant vinorelbine/cisplatin vs observation alone were used (validation series B). This series, recently published by Zhu et al., [Zhu, et al. 2010, Journal of Clinical Oncology: 28], described 133 samples in total; however 43 patients were part of the NIH Directors Challenge study (25 of whom were included in validation series A) and were therefore excluded from validation series C.

[0194] Relevant clinico-pathological information for the six series of lung cancer patients used in this study is summarized in Table 1. Consent was obtained for all subjects using protocols approved by each institution's Institutional Review Board, as described in the original publications listed in Table 7.

### Gene Selection and Prognostic Algorithm Training

[0195] Genomic and clinical data from the 329-patient training series A were integrated to identify genes with individual prognosis significance, using methods as previously described [Van Laar 2010, British journal of cancer: 103; Van Laar 2011, The Journal of molecular diagnostics: JMD]. Briefly, after filtering out low intensity features from each profile and reducing redundant probes to one per gene, 6566 genes remained. Individual genes were selected for inclusion in the classification final model if they were significantly associated with outcome at P<0.001 in cross-validated Cox regression models, including age at diagnosis, smoking history, gender, histological grade and AJCC stage [Cox 1972, Journal of the Royal Statistical Society: B; Simon, et al. 2007, Cancer Inform: 3]. At each round of cross validation, significant genes were used to train a principal component classification algorithm, which was then used to predict the risk status of the held-out sample.

[0196] At the conclusion of the cross-validation exercise, genes present in >=20% of the models were converted to percent-rank values and used to form a final classifier, as previously described [Van Laar 2010, British journal of cancer: 103]. The 60^{th} percentile of the prognostic indexes calculated for training series A was used as the threshold for high/low risk assignment. The finalized classifier was then applied to independent validation series A, in order to evaluate its prognostic significance in adenocarcinoma patient data not used in the gene selection or algorithm training process.

[0197] As a key criterion for evaluating NSCLC prognostic gene expression assays is the ability to improve over current ‘clinical’ assessments of patients with stage 1 disease. To this end, a prognostic equation for predicting outcome (high/low risk) was developed based on tumor size (≦3 cm or >3 cm) and age at diagnosis of stage I patients in training series A, based on methods described in Subramanian & Simon [Subramanian and Simon 2010, Journal of the National Cancer Institute: 102]. The trained clinical algorithm was then used to stratify stage I patients in validation series A into high or low risk groups for DSS.

### Development and Validation of a Gene Expression Signature to Predict Adjuvant Chemotherapy Benefit

[0198] Patients from validation series B were analyzed using the Cox Regression method previously described. Genes were selected if they were significantly associated with outcome in patients treated with ACT, independent to age, stage, gender, smoking history and prognosis risk group at P<0.001. A principal component algorithm was trained on the genes identified and then applied to the 90-patient training series B. The algorithm assigned patients to categories corresponding to ‘ACT benefit’ or ‘no ACT benefit’ and the survival characteristics of patients treated with ACT or OBS were compared within each category. Gene expression data were analyzed using BRB ArrayTools [Simon, et al. 2007, Cancer Inform: 3], R (www.r-project.org), and Bioconductor [Gentleman, et al. 2004, Genome biology: 5]. Statistical analyses were performed using MedCalc (MedCalc Software, Mariakerke, Belgium).

[0199] To evaluate the significance of the prognostic signature developed, Kaplan Meier analysis with log rank testing was performed on risk groups identified in independent validation series. Receiver Operator Curve (ROC) analysis was also performed on both gene expression and clinical-variable risk classifiers. Patients with less than 12 months follow-up were excluded from the ROC analyses and deaths were censored at 5 years.

[0200] For validation series A and B, multivariate Cox Proportional Hazards analysis was used to determine if the risk group stratifications were independent to clinical covariates and genomic platform (where applicable). Survival data for patients analyzed with the prognostic signature were censored at 60 months.

### Prognostic Gene Selection & Algorithm Training

[0201] The multivariate method of gene selection employed identified a set of 160 Affymetrix probes corresponding to unique genes, whose pattern of expression was significantly associated with outcome over and above the clinical variables. The normalized log intensity values associated with these genes were converted to percent-ranks and used to train a single meta-gene algorithm, which generates a prognostic index for each patient that is continuously associated with risk of death from lung cancer. The association between the 160-gene expression profile, the resulting prognostic index and patient outcome can be observed in FIG. 13 while an annotated list of probe IDs, represented by oligonucleotide primer SEQ ID NOS: 1-11, 171-183, 271-383, 25777-25787 and 27865-29496, and individual correlations and p-value for association without outcome is provided in Table 8.

[0202] Functional characterization of the 160 gene set was performed using DAVID (http://david.abcc.ncifcrf.gov/) [Dennis, et al. 2003, Genome biology: 4]. Clustering of gene annotation terms and enrichment assessment revealed genes involved in negatively regulating metabolic processes (enrichment score: 4.31), regulation of cellular organization (1.52), cell cycle control (1.25) and apoptosis (1.15) to be a significant component of the signature. Genes implicated in the MAPK signaling pathway (i.e. CDC42, MKNK1, MAPKAPK2 and TRADD) were also significantly over-represented in the gene set, compared to random selection (P=0.034). Activation of the MAPK signaling pathway has recently been linked to the oncogenic factor EAPII (TDP2) and the development of lung cancer[Li, et al. 2011, Oncogene].

### Predictive Gene Selection and Algorithm Training

[0203] Cross-validated Cox Regression models identified 37 unique genes associated with outcome in ACT-treated patients from training series B. The significance of each gene was independent to age, stage, gender and prognosis (as calculated using the 160-gene model described above). During cross-validation, the status of the held-out sample was predicted based on a principal component algorithm trained on significant genes identified in the other 87 (N-1) samples. Cross validated training-series risk groups with significant differences in DSS (P=0.0021, HR: 2.48, 95% CI: 1.40 to 4.42).

[0204] Analysis of gene function using DAVID showed the 37-gene signature represents cellular processes involved in vinorelbine function such as lipid metabolism (e.g. LARGE, FA2H, and PCYT1B) [Robieux, et al. 1996, Clin Pharmacol Ther: 59] and also in cisplatin function, including membrane transport (e.g. SLC17A1, COX411 and SLC2A1) [Egawa-Takata, et al. Cancer Science: 101], apoptosis/proliferation (e.g. CASP9, DUSP22 and TBX2) [Kuwahara, et al. 2000, Cancer Lett: 148] and purine binding (DHX16, DHX16, and LYN) [Kowalski, et al. 2008, Molecular Pharmacology: 74]. The full list of annotated genes, represented by oligonucleotide primer SEQ ID NOS: 384-476, 27865-27880 and 29497-29809, with Cox regression p-values, is provided in Table 9.

### Independent Validation of the 160-Gene Prognosis Signature

[0205] The trained algorithm was then applied to data from a series of 327 lung adenocarcinoma patients with stage 1-2 disease, receiving either no adjuvant therapy (n=321) or radiotherapy only (n=19). Four microarray types were present in the validation series and each was found to contain a different proportion of the 160-gene signature; Affymetrix U133a and U133 Plus 2.0: 160/160 (100%), Affymetrix U95A: 132/160 (83%) and Agilent: 135/160 (84%).

[0206] Kaplan Meier analysis (with log rank testing) and multivariate Cox Proportional Hazards analysis was used to compare the difference in outcome between the high and low risk groups for the complete series and also stage-based subsets is shown in Table 10.

TABLE 10
Analysis of the independent validation series risk group predictions
generated using the 160-gene prognostic signature.

| | | | | Kaplan Meier Analysis | | Cox Proportional Hazards | |
|---|---|---|---|---|---|---|---|
| | | | | (160-gene signature | | Regression (160-gene | |
| | | Receiver Operator | | assigned high/low risk | | signature assigned high/low | |
| | | Curve analysis | | categories) | | risk categories) | |
| | No. | | AUC (95% | Univariate | Hazard Ratio | Multivariate | Hazard Ratio |
| Stage | patients | P-value | CI) | P-value | (95% CI) | P-value | (95% CI) |
| I & II | 327 | <0.0001 | 0.67 (0.61 | <0.0001 | 2.055 (1.45 | <0.0001 | 2.31 (1.64 to |
| | | | to 0.73) | | to 2.92) | | 3.26) |
| I | 201 | 0.0002 | 0.68 (0.61 | 0.0008 | 2.26 (1.31 to | <0.0001 | 3.56 (2.026 to |
| | | | to 0.75) | | 3.89) | | 6.28) |
| IA | 93 | 0.025 | 0.693 (0.59 | 0.18 | 1.76 (0.70 to | 0.045 | 2.65 (1.029 to |
| | | | to 0.78) | | 4.47) | | 6.84) |
| IB | 97 | 0.0001 | 0.746 (0.65 | 0.0008 | 2.79 (1.38 to | <0.0001 | 5.45 (2.48 to |
| | | | to 0.83) | | 5.64) | | 11.97) |
| II | 66 | 0.52 | 0.55 (0.41 | 0.019 | 2.43 (1.15 to | 0.019 | 2.73 (1.19 to |
| | | | to 0.69) | | 5.14) | | 6.23) |
| IIA | 16 | 0.032 | 0.77 (0.50 | 0.013 | 4.53 (1.38 to | 0.012 | 22.048 (1.99 |
| | | | to 0.94) | | 13.77) | | to 244.30.) |
| IIB | 36 | 0.54 | 0.44 (0.29 | 0.33 | 1.62 (0.60 to | 0.48 | 1.44 (0.54 to |
| | | | to 0.61) | | 4.33) | | 4.027) |

[0207] Of the 255-patient independent validation series, 164 patients were assigned to the low risk category (64%) and 91 to the high risk category (36%). Kaplan Meier analysis with log rank testing was highly significant (P<0.0001) and a hazard ratio of 2.44 (95% CI: 1.57 to 3.79) observed. When adjusted for age, gender, AJCC Stage (I vs II), and microarray-type, the 160-gene signature remains significant (P<0.0001) and is the strongest predictor of outcome (hazard ratio: 2.95, 95% CI: 1.91 to 4.55). The area-under-the-curve (AUC), a combined measurement of test sensitivity and specificity, for stage I-II patients was 0.64 (95% CI: 0.58 to 0.70), which was statistically significant (P=0.0002).

[0208] In addition to gene expression platform independence, the 160-gene signature was also shown to be compatible with other non-PCA based classification algorithms (data not shown). The gene set results in statistically significant risk group stratification of validation series A patients when used in conjunction with the method referred to as “Prediction Analysis of Microarrays” (PAM) [Tibshirani, et al. 2002, Proceedings of the National Academy of Sciences: 99], nearest centroid classifier or linear discriminant analysis [Dudoit, et al. 2002, Journal of the American Statistical Association: 97] (all log rank test p-value≦0.05). The gene set approached, but did not achieve, statistical significance when used with a nearest neighbor or support vector machine [Brown, et al. 2000, Proc Natl Acad Sci USA: 97] algorithm (P=0.093 and 0.11 respectively). Ultimately, the PCA method used was retained as the method of analysis as it resulted in the largest, statistically-significant validation series hazard ratio and has previously been used to develop prognostic assays for other cancer types [Van Laar 2010, British journal of cancer: 103; Van Laar 2011, The Journal of molecular diagnostics: JMD].

[0209] The 160-gene signature was also investigated in patients from two additional series of NSCLC patients for which P53, KRAS and EGFR mutation testing results and gene expression data were available [Angulo, et al. 2008, The Journal of Pathology: 214; Ding, et al. 2008, Nature: 455]. The 160-gene prognostic score (previously shown to be positively correlated with worsening prognosis), was found to be correlated with P53 mutation status (coefficient=0.75), mildly inversely correlated with KRAS mutation status (−0.33) and also inversely correlated with EGFR mutation status (−0.73). Overall, individuals with the ‘poor prognosis’ gene expression profile were likely to be P53-mutant, EGFR-wildtype (data not shown).

Comparison of Prognosis by Gene Expression Vs. Clinical Formula

[0210] As described by Subramanian & Simon, a simple clinical-variable classifier was developed based on patient age and tumor size (≦3 cm or >3 cm) using 195 training series A Stage I patients. The resulting formula was then used to predict the outcome of the Stage I patients in independent validation series A. Kaplan Meier analysis of the predicted ‘clinical’ outcome groups revealed a statistically significant difference in 5-year OS (P=0004, HR: 2.65 95% CI 1.40 to 1.99) which is marginally less accurate than the 160-gene signature (P=0.002 HR: 2.82 95% CI 1.53 to 5.19 for same patient subset).

[0211] Despite the similarity of hazard ratios calculated for the clinical and molecular methods, inspection of the 12 and 24-month point on the Kaplan Meier curves in FIG. 14 reveals an important difference between the methods. The 160-gene signature is superior at identifying stage I patients at increased risk of death within the first 24 months following diagnosis, compared to either staging alone or the clinical model. This is highlighted further by the differences in AUC, calculated on data censored at 60 months (gene-sig: 0.69, clinical 0.64), 36 months (gene-sig: 0.71, clinical: 0.61), 24 months (gene-sig: 0.74, clinical: 0.61) and 12 months: (gene-sig: 0.81, clinical: 0.62).

[0212] Five patients from independent validation series A were diagnosed with stage 1A disease (ages 63-74 yrs), did not receive systemic therapy, and died within 24 months (3 died within 12 months). All five (100%) were predicted to be high-risk cases by 160-gene signature. Conversely, 0 out of 65 gene-signature ‘low risk’ stage 1A patients died within the same time period, although 13 deaths were recorded over the full 5 year follow-up period (20%). These data suggest the 160-gene algorithm is effective at identifying early-stage individuals at short-term risk of death from lung cancer, warranting increased screening and/or the use of systemic or targeted therapies.

### Independent Validation of the 37-Gene Predictive Signature

[0213] The 37-gene ACT-response signature, identified from 88 ACT-treated adenocarcinoma patients (training series B), was applied to data from validation series B. This series represents 90 participants from a randomized controlled clinical trial, designed to investigate the use of genomic profiling to predict treatment benefit. Sixty-six (73%) patients were classified as ‘ACT benefit’ and 24 (27%) as ‘no ACT benefit’ on the basis of the gene expression profile. The survival characteristics of those who received ACT vs. OBS only were compared within each of the response-prediction categories.

[0214] As shown in FIG. 15, patients in the ‘ACT benefit’ group experienced a significant reduction in DSS when treated with ACT compared to observation only. This difference was statistically significant in both univariate (log rank) testing; P=0.016, and in a multivariate analysis when adjusted for differences related to age, gender, stage and histology; P=0.0051. Individuals predicted to benefit from ACT were between 2.9-times (univariate) and 4.0-times (adjusted) less at risk of death from the disease during the study period when treated with ACT, compared to OBS alone.

[0215] Patients in the predicted ‘No ACT benefit’ group exhibited no difference in DSS between ACT or observation only groups—at either the univariate (P=0.72) or multivariate level (P=0.74). No significant difference was also observed when the signature was applied to 363 patients from training and validation series A (P>0.05), confirming that the 37-gene signature is predictive and not prognostic.

### Lung Cancer Prognosis and Treatment-Response Signatures—Determination of Minimum Gene Set Required.

[0216] Classifiers were trained (leave-one-out cross validation) using subsets of the full 160 genes identified as being significantly associated with outcome in untreated lung adenocarcinoma patients. Genes were ranked by Cox-regression p-values to create subsets. The prognostic risk group assignments generated by each model were evaluated against the true outcome of patients in the study (i.e. training series A) and are shown in Table 11 and the associated graph.

TABLE 11
Comparison of the prognostic value of using less than the full 160-gene
signature associated with outcome in untreated lung adenocarcinoma
patients.

| Number of | | | Lower | Upper |
|---|---|---|---|---|
| genes in | | Hazard | boundary of 95% | boundary of 95% |
| classifier | P-value | ratio | confidence interval | confidence interval |
| 160 | <0.0001 | 2.56 | 1.76 | 3.72 |
| 128 | <0.0001 | 2.4 | 1.68 | 3.48 |
| 105 | <0.0001 | 2.35 | 1.61 | 3.41 |
| 92 | <0.0001 | 2.5 | 1.72 | 3.64 |
| 68 | <0.0001 | 2.56 | 1.75 | 3.72 |
| 61 | <0.0001 | 2.46 | 1.69 | 3.59 |
| 39 | <0.0001 | 2.78 | 1.91 | 4.05 |
| 31 | <0.0001 | 2.72 | 1.88 | 3.95 |
| 20 | <0.0001 | 2.2 | 1.51 | 3.21 |
| 15 | 0.0002 | 1.94 | 1.33 | 2.82 |
| 4 | 0.0039 | 1.68 | 1.15 | 2.44 |
| 2 | 0.033 | 1.47 | 1.017 | 2.13 |

[0217] Statistically significant risk-group stratification was observed with as few as 2 genes, therefore this is the minimum number required to classify patients as high or low risk for disease-specific death from stage 1A lung cancer.

### 37-Gene Treatment-Response Prediction Signature

[0218] Classifiers were trained (leave-one-out cross validation) using subsets of the full 37 genes, ranked by Cox-regression p-value and evaluated against the true outcome of patients in the study (i.e. training series B) and are shown in Table 12 and associated graph.

TABLE 12
Comparison of the predictive value of using less than the full 37-gene
signature associated with outcome in adjuvant-treated lung
adenocarcinoma patients.

| | | | Lower boundary of | Upper |
|---|---|---|---|---|
| Genes in | | Hazard | 95% confidence | boundary of 95% |
| classifier | P-value | ratio | interval | confidence interval |
| 37 | 0.0006 | 2.83 | 1.59 | 5.02 |
| 33 | 0.0024 | 2.45 | 1.38 | 4.37 |
| 27 | 0.0078 | 2.17 | 1.22 | 3.87 |
| 19 | 0.1 | 1.61 | 0.91 | 2.86 |
| 10 | 0.19 | 1.46 | 0.82 | 2.59 |
| 4 | 0.049 | 1.82 | 1.024 | 3.22 |
| 2 | 0.0297 | 1.89 | 1.067 | 3.36 |

[0219] The full 37-gene signature results in the largest hazard ratio, however statistically significant response-group stratification of patients was observed with as few as two (2) genes. Therefore the minimum gene set required for prediction of treatment response is two genes.

[0220] A 160-gene prognosis signature identified patients with stage I/II adenocarcinoma who are at increased risk of death, independent to age, stage and gender (Hazard ratio: 2.33, P<0.0001). The gene signature is superior to stage and clinical assessments of prognosis at identifying poor-prognosis early stage patients, potentially warranting a monitoring or treatment regimen in these individuals different to the current standard of care. A set of 37 genes were found to be associated with outcome in patients receiving ACT, independent to their prognosis score. These were used to stratify an independent series of early-stage NSCLC participants in a randomized controlled trial of adjuvant vinorelbine/cisplatin (ACT) vs. observation alone (OBS). For those patients with the ACT-response signature (73%), receiving ACT resulted in a 4.0-fold risk-reduction for death from lung cancer (adjusted for covariates, P=0.0051). No difference was observed between treatment arms for those patients predicted to be ‘non-responders’ (P=0.85).

[0221] In summary, the invention provides gene markers listed in Table 1, Table 3, Table 6, Table 8, and Table 9, the specific oligonucleotide probe sequences of which are provided in the appended Sequence Listing, which can be used in methods to determine tumor tissue of origin in cancer patients, prognosis of breast cancer recurrence, prognosis of colon cancer recurrence, prognosis of non-small cell lung cancer and treatment response of non-small-cell lung cancer respectively. Also provided are methods of use of the gene marker (polynucleotide) sets.

[0222] The specific embodiments described herein are offered by way of example only, and the invention is to be limited only by the terms of the appended claims along with the full scope of equivalents to which such claims are entitled.

TABLE 1
List of probes used for tumor origin prediction

| | Genbank | | | | |
|---|---|---|---|---|---|
| Affymetrix | Accession | | Affymetrix | Genbank | |
| Probeset | No | SEQ ID NOS | Probeset | Accession No | SEQ ID NOS |
| 1431_at | J02843 | 477-492 | 211793_s_at | AF260261 | 12285-12291 |
| 1552378_s_at | NM_172037 | 493-503 | 211797_s_at | U62296 | 12292-12302 |
| 1552487_a_at | NM_001717 | 504-514 | 211843_x_at | AF315325 | 12303-12312 |
| 1552496_a_at | NM_015198 | 515-525 | 211848_s_at | AF006623 | 12313-12323 |
| 1552575_a_at | NM_153344 | 526-536 | 211881_x_at | AB014341 | 12324-12334 |
| 1552627_a_at | NM_001173 | 537-547 | 211882_x_at | U27331 | 12335-12345 |
| 1552648_a_at | NM_003844 | 548-558 | 211883_x_at | M76742 | 12346-12356 |
| 1552742_at | NM_144633 | 559-569 | 211889_x_at | D12502 | 12357-12362 |
| 1552754_a_at | AA640422 | 570-580 | 211890_x_at | AF127765 | 12363-12373 |
| 1553081_at | NM_080869 | 581-591 | 211896_s_at | AF138302 | 12374-12384 |
| 1553089_a_at | NM_080736 | 592-602 | 211906_s_at | AB046400 | 12385-12393 |
| 1553169_at | BC019612 | 603-613 | 211934_x_at | W87689 | 12394-12404 |
| 1553179_at | NM_133638 | 614-624 | 211945_s_at | BG500301 | 12405-12415 |
| 1553394_a_at | NM_003221 | 625-635 | 211960_s_at | BG261416 | 12416-12426 |
| 1553413_at | NM_025011 | 636-646 | 211974_x_at | AL513759 | 351-361 |
| 1553434_at | NM_173534 | 647-657 | 212014_x_at | AI493245 | 12427-12427 |
| 1553530_a_at | NM_033669 | 658-668 | 212063_at | BE903880 | 12428-12438 |
| 1553589_a_at | NM_005764 | 669-679 | 212089_at | M13452 | 12439-12449 |
| 1553602_at | NM_058173 | 680-690 | 212092_at | BE858180 | 12450-12460 |
| 1553605_a_at | NM_152701 | 691-701 | 212094_at | AL582836 | 225-235 |
| 1553622_a_at | NM_152597 | 702-712 | 212224_at | NM_000689 | 236-246 |
| 1553808_a_at | NM_145285 | 713-723 | 212233_at | AL523076 | 12461-12471 |
| 1554375_a_at | AF478446 | 724-734 | 212236_x_at | Z19574 | 12472-12482 |
| 1554436_a_at | AY126671 | 735-745 | 212252_at | AA181179 | 12483-12493 |
| 1554459_s_at | BC020687 | 746-756 | 212285_s_at | AW008051 | 12494-12504 |
| 1554460_at | BC027866 | 757-767 | 212287_at | BF382924 | 12505-12515 |
| 1554491_a_at | BC022309 | 768-778 | 212339_at | AL121895 | 12516-12526 |
| 1554547_at | BC036453 | 779-789 | 212444_at | AA156240 | 12527-12537 |
| 1554592_a_at | BC028721 | 790-800 | 212486_s_at | N20923 | 12538-12548 |
| 1554600_s_at | BC033088 | 801-811 | 212558_at | BF508662 | 12549-12559 |
| 1554789_a_at | AB085825 | 812-822 | 212587_s_at | AI809341 | 362-372 |
| 1555236_a_at | BC042578 | 823-833 | 212588_at | Y00062 | 12560-12570 |
| 1555349_a_at | L78790 | 834-844 | 212624_s_at | BF339445 | 12571-12581 |
| 1555383_a_at | BC017500 | 845-855 | 212636_at | AL031781 | 12582-12592 |
| 1555404_a_at | BC029819 | 856-866 | 212654_at | AL566786 | 12593-12603 |
| 1555497_a_at | AY151049 | 867-877 | 212657_s_at | U65590 | 12604-12614 |
| 1555520_at | BC043542 | 878-888 | 212688_at | BC003393 | 12615-12625 |
| 1555778_a_at | AY140646 | 889-899 | 212713_at | R72286 | 12626-12636 |
| 1555779_a_at | M74721 | 900-910 | 212741_at | AA923354 | 12637-12647 |
| 1555814_a_at | AF498970 | 911-921 | 212764_at | AI806174 | 12648-12658 |
| 1555854_at | AA594609 | 922-932 | 212768_s_at | AL390736 | 12659-12669 |
| 1556116_s_at | AI825808 | 933-943 | 212780_at | AA700167 | 12670-12680 |
| 1556168_s_at | BC042133 | 944-954 | 212816_s_at | BE613178 | 12681-12691 |
| 1556194_a_at | BC042959 | 955-965 | 212843_at | AA126505 | 12692-12702 |
| 1556474_a_at | AK095698 | 966-976 | 212909_at | AL567376 | 12703-12713 |
| 1556641_at | AK094547 | 977-987 | 212925_at | AA143765 | 12714-12724 |
| 1556773_at | M31157 | 988-998 | 212935_at | AB002360 | 12725-12735 |
| 1556793_a_at | AK091138 | 999-1009 | 212983_at | NM_005343 | 12736-12746 |
| 1557053_s_at | BC035653 | 1010-1020 | 212992_at | AI935123 | 12747-12757 |
| 1557122_s_at | BC036592 | 1021-1031 | 213002_at | AA770596 | 12758-12768 |
| 1557136_at | BG059633 | 1032-1042 | 213022_s_at | NM_007124 | 12769-12779 |
| 1557146_a_at | T03074 | 1043-1053 | 213036_x_at | Y15724 | 12780-12787 |
| 1557382_x_at | AI659151 | 1054-1064 | 213050_at | AA594937 | 428-438 |
| 1557417_s_at | AA844689 | 1065-1075 | 213068_at | AI146848 | 12788-12798 |
| 1557545_s_at | BF529886 | 1076-1086 | 213093_at | AI471375 | 12799-12809 |
| 1557651_x_at | AK096127 | 1087-1097 | 213106_at | AI769688 | 12810-12820 |
| 1557905_s_at | AL552534 | 1098-1108 | 213143_at | BE856707 | 12821-12831 |
| 1557921_s_at | BC013914 | 1109-1119 | 213150_at | BF792917 | 12832-12842 |
| 1558093_s_at | BI832461 | 1120-1130 | 213201_s_at | AJ011712 | 12843-12853 |
| 1558189_a_at | BG819064 | 1131-1141 | 213228_at | AK023913 | 12854-12863 |
| 1558214_s_at | BG330076 | 1142-1152 | 213240_s_at | X07695 | 12864-12874 |
| 1558388_a_at | R41806 | 1153-1163 | 213265_at | AI570199 | 12875-12885 |
| 1558549_s_at | BG120535 | 1164-1174 | 213276_at | T15766 | 12886-12896 |
| 1558775_s_at | AU142380 | 1175-1185 | 213294_at | AV755522 | 12897-12907 |
| 1558795_at | AL833240 | 1186-1196 | 213355_at | AI989567 | 12908-12918 |
| 1558796_a_at | AL833240 | 1197-1207 | 213385_at | AK026415 | 12919-12929 |
| 1558828_s_at | AL703532 | 1208-1218 | 213395_at | AL022327 | 12930-12940 |
| 1559064_at | BC035502 | 1219-1229 | 213417_at | AW173045 | 12941-12951 |
| 1559203_s_at | BC029545 | 1230-1240 | 213421_x_at | AW007273 | 12952-12953 |
| 1559239_s_at | AW750026 | 1241-1251 | 213438_at | AA995925 | 12954-12964 |
| 1559459_at | BC043571 | 1252-1262 | 213441_x_at | AI745526 | 247-248 |
| 1559477_s_at | AL832770 | 1263-1273 | 213482_at | BF593175 | 12965-12975 |
| 1559606_at | AL703282 | 1274-1284 | 213486_at | BF435376 | 12976-12986 |
| 1559607_s_at | AL703282 | 1285-1295 | 213487_at | AI762811 | 12987-12997 |
| 1559949_at | T56980 | 1296-1306 | 213492_at | X06268 | 12998-13008 |
| 1559965_at | BC037827 | 1307-1317 | 213506_at | BE965369 | 13009-13019 |
| 1560225_at | AI434253 | 1318-1328 | 213523_at | AI671049 | 13020-13030 |
| 1560770_at | BQ719658 | 1329-1339 | 213573_at | AA861608 | 13031-13041 |
| 1560850_at | BC016831 | 1340-1350 | 213574_s_at | AA861608 | 13042-13052 |
| 1561421_a_at | AK057259 | 1351-1361 | 213596_at | AL050391 | 13053-13063 |
| 1561658_at | AF086066 | 1362-1372 | 213609_s_at | AB023144 | 13064-13074 |
| 1561817_at | BF681305 | 1373-1383 | 213638_at | AW054711 | 13075-13085 |
| 1561956_at | AF085947 | 1384-1394 | 213674_x_at | AI858004 | 13086-13096 |
| 1562981_at | AY034472 | 1395-1405 | 213680_at | AI831452 | 13097-13107 |
| 1564307_a_at | AL832750 | 1406-1416 | 213693_s_at | AI610869 | 13108-13118 |
| 1564494_s_at | AK075503 | 1417-1427 | 213695_at | L48516 | 13119-13129 |
| 1565162_s_at | D16947 | 1428-1438 | 213707_s_at | NM_005221 | 13130-13140 |
| 1565228_s_at | D16931 | 1439-1449 | 213721_at | L07335 | 13141-13151 |
| 1565269_s_at | AF047022 | 1450-1460 | 213724_s_at | AI870615 | 13152-13162 |
| 1565868_at | W96225 | 1461-1471 | 213766_x_at | N36926 | 13163-13173 |
| 1565936_a_at | T24091 | 1472-1482 | 213791_at | NM_006211 | 13174-13184 |
| 1566140_at | AK096707 | 1483-1493 | 213800_at | X04697 | 13185-13195 |
| 1566764_at | AL359055 | 1494-1504 | 213803_at | BG545463 | 13196-13206 |
| 1568603_at | AI912173 | 1505-1515 | 213825_at | AA757419 | 13207-13217 |
| 1568604_a_at | AI912173 | 1516-1526 | 213841_at | BE223030 | 13218-13228 |
| 1569361_a_at | BC028018 | 1527-1537 | 213849_s_at | AA974416 | 13229-13239 |
| 1569872_a_at | BC036550 | 1538-1548 | 213870_at | AL031228 | 13240-13250 |
| 1569886_a_at | BC040605 | 1549-1559 | 213880_at | AL524520 | 13251-13261 |
| 160020_at | Z48481 | 1560-1575 | 213909_at | AU147799 | 13262-13272 |
| 1729_at | L41690 | 271-286 | 213917_at | BE465829 | 13273-13283 |
| 1861_at | U66879 | 1576-1591 | 213920_at | AB006631 | 13284-13294 |
| 200059_s_at | BC001360 | 1592-1602 | 213943_at | X99268 | 13295-13305 |
| 200602_at | NM_000484 | 1603-1613 | 213944_x_at | BG236220 | 13306-13311 |
| 200604_s_at | M18468 | 1614-1624 | 213947_s_at | AI867102 | 13312-13322 |
| 200606_at | NM_004415 | 1625-1635 | 213953_at | AI732381 | 13323-13333 |
| 200624_s_at | AA577695 | 1636-1646 | 213980_s_at | AA053830 | 13334-13344 |
| 200664_s_at | BG537255 | 1647-1657 | 213992_at | AI889941 | 13345-13355 |
| 200693_at | NM_006826 | 1658-1668 | 213993_at | AI885290 | 13356-13366 |
| 200697_at | NM_000188 | 1669-1679 | 213994_s_at | AI885290 | 13367-13377 |
| 200764_s_at | AI826881 | 1680-1689 | 214014_at | W81196 | 13378-13388 |
| 200765_x_at | NM_001903 | 1690-1699 | 214053_at | AW772192 | 13389-13399 |
| 200771_at | NM_002293 | 1700-1710 | 214063_s_at | AI073407 | 13400-13410 |
| 200832_s_at | AB032261 | 1711-1721 | 214069_at | AA865601 | 13411-13421 |
| 200863_s_at | AI215102 | 1722-1732 | 214070_s_at | AW006935 | 13422-13432 |
| 200931_s_at | NM_014000 | 22-Dec | 214074_s_at | BG475299 | 13433-13443 |
| 201016_at | BE542684 | 1733-1743 | 214079_at | AK000345 | 13444-13454 |
| 201017_at | BG149698 | 1744-1754 | 214087_s_at | BF593509 | 13455-13465 |
| 201019_s_at | NM_001412 | 1755-1765 | 214091_s_at | AW149846 | 13466-13476 |
| 201058_s_at | NM_006097 | 1766-1776 | 214119_s_at | AI936769 | 13477-13487 |
| 201059_at | NM_005231 | 1777-1787 | 214133_at | AI611214 | 13488-13498 |
| 201092_at | NM_002893 | 1788-1798 | 214135_at | BE551219 | 13499-13509 |
| 201109_s_at | AV726673 | 1799-1809 | 214142_at | AI732905 | 13510-13520 |
| 201116_s_at | AI922855 | 1810-1820 | 214147_at | AL046350 | 13521-13531 |
| 201128_s_at | NM_001096 | 1821-1831 | 214157_at | AA401492 | 13532-13542 |
| 201131_s_at | NM_004360 | 1832-1842 | 214164_x_at | BF752277 | 13543-13553 |
| 201202_at | NM_002592 | 287-297 | 214199_at | NM_003019 | 13554-13564 |
| 201209_at | NM_004964 | 1843-1853 | 214219_x_at | BE646618 | 13565-13565 |
| 201234_at | NM_004517 | 1854-1864 | 214235_at | X90579 | 13566-13576 |
| 201235_s_at | BG339064 | 1865-1875 | 214243_s_at | AL450314 | 13577-13587 |
| 201242_s_at | BC000006 | 1876-1886 | 214247_s_at | AU148057 | 13588-13598 |
| 201262_s_at | NM_001711 | 1887-1897 | 214259_s_at | AI144075 | 13599-13609 |
| 201286_at | Z48199 | 1898-1908 | 214303_x_at | AW192795 | 13610-13620 |
| 201288_at | NM_001175 | 298-308 | 214324_at | BF222483 | 13621-13631 |
| 201328_at | AL575509 | 1909-1919 | 214339_s_at | AA744529 | 13632-13637 |
| 201329_s_at | NM_005239 | 1920-1930 | 214352_s_at | BF673699 | 13638-13648 |
| 201349_at | NM_004252 | 1931-1941 | 214370_at | AW238654 | 13649-13659 |
| 201401_s_at | M80776 | 1942-1952 | 214385_s_at | AI521646 | 13660-13666 |
| 201415_at | NM_000178 | 1953-1963 | 214387_x_at | AA633841 | 13667-13671 |
| 201428_at | NM_001305 | 1964-1974 | 214411_x_at | AW584011 | 13672-13682 |
| 201431_s_at | NM_001387 | 1975-1985 | 214421_x_at | AV652420 | 13683-13693 |
| 201435_s_at | AW268640 | 1986-1996 | 214448_x_at | NM_002503 | 13694-13704 |
| 201436_at | AI742789 | 1997-2007 | 214451_at | NM_003221 | 13705-13715 |
| 201437_s_at | NM_001968 | 2008-2018 | 214465_at | NM_000608 | 13716-13726 |
| 201453_x_at | NM_005614 | 2019-2029 | 214475_x_at | AF127764 | 13727-13732 |
| 201461_s_at | NM_004759 | 2030-2040 | 214476_at | NM_005423 | 13733-13743 |
| 201464_x_at | BG491844 | 2041-2051 | 214487_s_at | NM_002886 | 13744-13754 |
| 201465_s_at | BC002646 | 2052-2062 | 214510_at | NM_005293 | 13755-13765 |
| 201466_s_at | NM_002228 | 2063-2073 | 214528_s_at | NM_013951 | 13766-13775 |
| 201468_s_at | NM_000903 | 2074-2084 | 214549_x_at | NM_005987 | 13776-13786 |
| 201495_x_at | AI889739 | 2085-2095 | 214577_at | BG164365 | 13787-13797 |
| 201496_x_at | S67238 | 2096-2106 | 214580_x_at | AL569511 | 13798-13808 |
| 201525_at | NM_001647 | 2107-2117 | 214590_s_at | AL545760 | 13809-13819 |
| 201528_at | BG398414 | 2118-2128 | 214598_at | AL049977 | 13820-13830 |
| 201585_s_at | BG035151 | 2129-2139 | 214599_at | NM_005547 | 13831-13841 |
| 201587_s_at | NM_001569 | 2140-2150 | 214601_at | AI350339 | 13842-13852 |
| 201596_x_at | NM_000224 | 2151-2161 | 214624_at | AA548647 | 13853-13863 |
| 201599_at | NM_000274 | 2162-2172 | 214639_s_at | S79910 | 13864-13874 |
| 201650_at | NM_002276 | 2173-2183 | 214651_s_at | U41813 | 13875-13885 |
| 201666_at | NM_003254 | 23-33 | 214669_x_at | BG485135 | 13886-13896 |
| 201727_s_at | NM_001419 | 2184-2194 | 214677_x_at | X57812 | 13897-13907 |
| 201755_at | NM_006739 | 2195-2205 | 214679_x_at | AL110227 | 13908-13912 |
| 201787_at | NM_001996 | 2206-2216 | 214680_at | BF674712 | 13913-13923 |
| 201792_at | NM_001129 | 2217-2227 | 214726_x_at | AL556041 | 13924-13934 |
| 201820_at | NM_000424 | 2228-2238 | 214803_at | BF344237 | 13935-13945 |
| 201839_s_at | NM_002354 | 2239-2249 | 214811_at | AB002316 | 13946-13956 |
| 201841_s_at | NM_001540 | 2250-2260 | 214842_s_at | M12523 | 13957-13967 |
| 201849_at | NM_004052 | 2261-2271 | 214895_s_at | AU135154 | 13968-13978 |
| 201860_s_at | NM_000930 | 2272-2282 | 214898_x_at | AB038783 | 13979-13989 |
| 201865_x_at | AI432196 | 171-181 | 214908_s_at | AC004893 | 13990-14000 |
| 201866_s_at | NM_000176 | 2283-2293 | 214917_at | AK024252 | 14001-14011 |
| 201884_at | NM_004363 | 2294-2304 | 214953_s_at | X06989 | 14012-14022 |
| 201903_at | NM_003365 | 2305-2315 | 214977_at | AK023852 | 14023-14033 |
| 201957_at | AF324888 | 2316-2326 | 214993_at | AF070642 | 14034-14044 |
| 201958_s_at | NM_002481 | 2327-2337 | 215037_s_at | U72398 | 14045-14055 |
| 202005_at | NM_021978 | 2338-2348 | 215045_at | BC004145 | 14056-14066 |
| 202068_s_at | NM_000527 | 34-44 | 215050_x_at | BG325734 | 14067-14076 |
| 202097_at | NM_005124 | 2349-2359 | 215059_at | AA053967 | 14077-14087 |
| 202178_at | NM_002744 | 2360-2370 | 215075_s_at | L29511 | 14088-14098 |
| 202219_at | NM_005629 | 2371-2381 | 215103_at | AW192911 | 14099-14109 |
| 202222_s_at | NM_001927 | 2382-2392 | 215214_at | H53689 | 14110-14120 |
| 202226_s_at | NM_016823 | 2393-2403 | 215240_at | AI189839 | 14121-14131 |
| 202260_s_at | NM_003165 | 2404-2414 | 215244_at | AI479306 | 14132-14142 |
| 202267_at | NM_005562 | 2415-2425 | 215356_at | AK023134 | 14143-14153 |
| 202274_at | NM_001615 | 2426-2436 | 215363_x_at | AW168915 | 14154-14156 |
| 202286_s_at | J04152 | 2437-2447 | 215382_x_at | AF206666 | 14157-14160 |
| 202291_s_at | NM_000900 | 2448-2458 | 215388_s_at | X56210 | 14161-14171 |
| 202329_at | NM_004383 | 2459-2469 | 215432_at | AC003034 | 14172-14182 |
| 202351_at | AI093579 | 2470-2480 | 215443_at | BE740743 | 14183-14193 |
| 202354_s_at | AW190445 | 2481-2491 | 215444_s_at | X81006 | 14194-14204 |
| 202357_s_at | NM_001710 | 2492-2502 | 215447_at | AL080215 | 14205-14215 |
| 202363_at | AF231124 | 2503-2513 | 215454_x_at | AI831055 | 14216-14224 |
| 202376_at | NM_001085 | 2514-2524 | 215464_s_at | AK001327 | 14225-14235 |
| 202409_at | X07868 | 2525-2535 | 215530_at | BG484069 | 14236-14246 |
| 202410_x_at | NM_000612 | 2536-2546 | 215574_at | AU144294 | 14247-14257 |
| 202411_at | NM_005532 | 2547-2557 | 215621_s_at | BG340670 | 14258-14268 |
| 202417_at | NM_012289 | 2558-2568 | 215688_at | AL359931 | 14269-14279 |
| 202425_x_at | NM_000944 | 2569-2579 | 215702_s_at | W60595 | 14280-14290 |
| 202429_s_at | AL353950 | 2580-2590 | 215704_at | AL356504 | 14291-14301 |
| 202449_s_at | NM_002957 | 2591-2601 | 215729_s_at | BE542323 | 14302-14312 |
| 202454_s_at | NM_001982 | 2602-2612 | 215806_x_at | M13231 | 14313-14315 |
| 202457_s_at | AA911231 | 45-55 | 215807_s_at | AV693216 | 14316-14326 |
| 202484_s_at | AF072242 | 2613-2623 | 215813_s_at | S36219 | 14327-14334 |
| 202489_s_at | BC005238 | 2624-2634 | 215946_x_at | AL022324 | 14335-14345 |
| 202504_at | NM_012101 | 384-394 | 215987_at | AV654984 | 14346-14356 |
| 202508_s_at | NM_003081 | 2635-2645 | 216025_x_at | M21940 | 14357-14360 |
| 202514_at | AW139131 | 2646-2656 | 216056_at | AW851559 | 14361-14371 |
| 202523_s_at | AI952009 | 2657-2667 | 216059_at | U02309 | 14372-14382 |
| 202525_at | NM_002773 | 2668-2678 | 216086_at | AB028977 | 14383-14393 |
| 202527_s_at | NM_005359 | 2679-2689 | 216199_s_at | AL109942 | 14394-14398 |
| 202528_at | NM_000403 | 2690-2700 | 216206_x_at | BC005365 | 14399-14409 |
| 202555_s_at | NM_005965 | 309-319 | 216237_s_at | AA807529 | 14410-14420 |
| 202575_at | NM_001878 | 2701-2711 | 216238_s_at | BG545288 | 14421-14431 |
| 202604_x_at | NM_001110 | 2712-2722 | 216243_s_at | BE563442 | 14432-14442 |
| 202615_at | BF222895 | 2723-2733 | 216258_s_at | BE148534 | 14443-14453 |
| 202618_s_at | L37298 | 2734-2744 | 216261_at | AI151479 | 14454-14464 |
| 202625_at | AI356412 | 2745-2755 | 216321_s_at | X03348 | 14465-14475 |
| 202626_s_at | NM_002350 | 2756-2766 | 216326_s_at | AF059650 | 14476-14486 |
| 202627_s_at | AL574210 | 2767-2777 | 216331_at | AK022548 | 14487-14497 |
| 202628_s_at | NM_000602 | 2778-2788 | 216339_s_at | AF086641 | 14498-14508 |
| 202637_s_at | AI608725 | 2789-2799 | 216379_x_at | AK000168 | 14509-14510 |
| 202638_s_at | NM_000201 | 2800-2810 | 216412_x_at | AF043584 | 14511-14521 |
| 202652_at | NM_001164 | 2811-2821 | 216430_x_at | AF043586 | 14522-14532 |
| 202677_at | NM_002890 | 2822-2832 | 216470_x_at | AF009664 | 14533-14542 |
| 202687_s_at | U57059 | 2833-2843 | 216474_x_at | AF206667 | 14543-14543 |
| 202688_at | NM_003810 | 2844-2854 | 216594_x_at | S68290 | 14544-14547 |
| 202704_at | AA675892 | 2855-2865 | 216623_x_at | AK025084 | 14548-14558 |
| 202718_at | NM_000597 | 2866-2876 | 216661_x_at | M15331 | 14559-14563 |
| 202762_at | AL049383 | 2877-2887 | 216687_x_at | U06641 | 14564-14571 |
| 202765_s_at | AI264196 | 2888-2898 | 216733_s_at | X86401 | 14572-14582 |
| 202787_s_at | U43784 | 2899-2909 | 216840_s_at | AK026829 | 14583-14593 |
| 202788_at | NM_004635 | 2910-2920 | 216918_s_at | AL096710 | 14594-14604 |
| 202790_at | NM_001307 | 2921-2931 | 216920_s_at | M27331 | 14605-14610 |
| 202820_at | NM_001621 | 2932-2942 | 216942_s_at | D28586 | 14611-14621 |
| 202825_at | NM_001151 | 2943-2953 | 216953_s_at | S75264 | 14622-14632 |
| 202831_at | NM_002083 | 2954-2964 | 216963_s_at | AF279774 | 14633-14643 |
| 202844_s_at | AW025261 | 2965-2975 | 217014_s_at | AC004522 | 249-259 |
| 202850_at | NM_002858 | 2976-2986 | 217023_x_at | AF099143 | 14644-14648 |
| 202864_s_at | NM_003113 | 2987-2997 | 217057_s_at | AF107846 | 14649-14659 |
| 202880_s_at | NM_004762 | 2998-3008 | 217073_x_at | X02162 | 14660-14660 |
| 202917_s_at | NM_002964 | 3009-3019 | 217077_s_at | AF095723 | 14661-14664 |
| 202927_at | NM_006221 | 3020-3030 | 217109_at | AJ242547 | 14665-14675 |
| 202928_s_at | NM_024165 | 3031-3041 | 217110_s_at | AJ242547 | 14676-14686 |
| 202935_s_at | AI382146 | 3042-3052 | 217133_x_at | X06399 | 14687-14697 |
| 202949_s_at | NM_001450 | 56-66 | 217157_x_at | AF103530 | 14698-14708 |
| 202950_at | NM_001889 | 3053-3063 | 217165_x_at | M10943 | 14709-14719 |
| 202965_s_at | NM_014289 | 3064-3074 | 217179_x_at | X79782 | 14720-14730 |
| 202997_s_at | BE251211 | 3075-3085 | 217227_x_at | X93006 | 14731-14741 |
| 203000_at | BF967657 | 3086-3096 | 217234_s_at | AF199015 | 14742-14752 |
| 203001_s_at | NM_007029 | 3097-3107 | 217258_x_at | AF043583 | 14753-14762 |
| 203021_at | NM_003064 | 3108-3118 | 217272_s_at | AJ001698 | 14763-14773 |
| 203029_s_at | NM_002847 | 3119-3129 | 217276_x_at | AL590118 | 14774-14784 |
| 203031_s_at | NM_000375 | 3130-3140 | 217284_x_at | AL589866 | 14785-14788 |
| 203074_at | NM_001630 | 3141-3151 | 217294_s_at | U88968 | 14789-14799 |
| 203108_at | NM_003979 | 3152-3162 | 217299_s_at | AK001017 | 14800-14810 |
| 203116_s_at | NM_000140 | 3163-3173 | 217404_s_at | X16468 | 14811-14821 |
| 203129_s_at | BF059313 | 3174-3184 | 217422_s_at | X52785 | 14822-14832 |
| 203130_s_at | NM_004522 | 3185-3195 | 217428_s_at | X98568 | 14833-14843 |
| 203131_at | NM_006206 | 3196-3206 | 217480_x_at | M20812 | 14844-14854 |
| 203132_at | NM_000321 | 3207-3217 | 217512_at | BG398937 | 14855-14865 |
| 203151_at | AW296788 | 3218-3228 | 217523_at | AV700298 | 14866-14876 |
| 203157_s_at | AB020645 | 3229-3239 | 217528_at | BF003134 | 14877-14887 |
| 203158_s_at | AF097493 | 3240-3250 | 217558_at | BE971373 | 14888-14898 |
| 203159_at | NM_014905 | 3251-3261 | 217564_s_at | W80357 | 14899-14909 |
| 203167_at | NM_003255 | 3262-3272 | 217590_s_at | AA502609 | 14910-14920 |
| 203179_at | NM_000155 | 3273-3283 | 217626_at | BF508244 | 14921-14931 |
| 203180_at | NM_000693 | 3284-3294 | 217744_s_at | NM_022121 | 14932-14942 |
| 203221_at | AI758763 | 3295-3305 | 217767_at | NM_000064 | 14943-14953 |
| 203222_s_at | NM_005077 | 3306-3316 | 217888_s_at | NM_018209 | 14954-14964 |
| 203240_at | NM_003890 | 3317-3327 | 217901_at | BF031829 | 14965-14975 |
| 203269_at | NM_003580 | 3328-3338 | 217936_at | AW044631 | 14976-14986 |
| 203279_at | NM_014674 | 3339-3349 | 217946_s_at | NM_016402 | 14987-14997 |
| 203325_s_at | AI130969 | 3350-3360 | 218181_s_at | NM_017792 | 14998-15008 |
| 203348_s_at | BF060791 | 3361-3371 | 218186_at | NM_020387 | 15009-15019 |
| 203351_s_at | AF047598 | 3372-3382 | 218221_at | AL042842 | 15020-15030 |
| 203352_at | NM_002552 | 3383-3393 | 218261_at | NM_005498 | 15031-15041 |
| 203394_s_at | BE973687 | 3394-3404 | 218284_at | NM_015400 | 15042-15052 |
| 203395_s_at | NM_005524 | 3405-3415 | 218309_at | NM_018584 | 15053-15063 |
| 203397_s_at | BF063271 | 3416-3426 | 218311_at | NM_003618 | 15064-15074 |
| 203400_s_at | NM_001063 | 3427-3437 | 218338_at | NM_004426 | 15075-15085 |
| 203411_s_at | NM_005572 | 3438-3447 | 218353_at | NM_025226 | 15086-15096 |
| 203413_at | NM_006159 | 3448-3458 | 218380_at | NM_021730 | 15097-15107 |
| 203423_at | NM_002899 | 3459-3469 | 218468_s_at | AF154054 | 15108-15118 |
| 203438_at | AI435828 | 3470-3480 | 218469_at | NM_013372 | 15119-15129 |
| 203453_at | NM_001038 | 3481-3491 | 218484_at | NM_020142 | 15130-15140 |
| 203510_at | BG170541 | 3492-3502 | 218510_x_at | AI816291 | 15141-15151 |
| 203525_s_at | AI375486 | 3503-3513 | 218532_s_at | NM_019000 | 15152-15162 |
| 203526_s_at | M74088 | 184-194 | 218625_at | NM_016588 | 15163-15173 |
| 203535_at | NM_002965 | 3514-3524 | 218644_at | NM_016445 | 15174-15184 |
| 203540_at | NM_002055 | 3525-3535 | 218687_s_at | NM_017648 | 15185-15195 |
| 203562_at | NM_005103 | 3536-3546 | 218689_at | NM_022725 | 15196-15206 |
| 203571_s_at | NM_006829 | 3547-3557 | 218692_at | NM_017786 | 15207-15217 |
| 203581_at | BC002438 | 3558-3568 | 218704_at | NM_017763 | 15218-15228 |
| 203582_s_at | NM_004578 | 3569-3579 | 218796_at | NM_017671 | 15229-15239 |
| 203625_x_at | BG105365 | 3580-3590 | 218804_at | NM_018043 | 15240-15250 |
| 203627_at | AI830698 | 3591-3601 | 218806_s_at | AF118887 | 15251-15261 |
| 203628_at | H05812 | 3602-3612 | 218824_at | NM_018215 | 15262-15272 |
| 203632_s_at | NM_016235 | 3613-3623 | 218835_at | NM_006926 | 15273-15283 |
| 203649_s_at | NM_000300 | 3624-3634 | 218857_s_at | NM_025080 | 15284-15294 |
| 203660_s_at | NM_006031 | 3635-3645 | 218865_at | NM_022746 | 15295-15305 |
| 203662_s_at | NM_003275 | 3646-3656 | 218880_at | N36408 | 15306-15316 |
| 203673_at | NM_003235 | 3657-3667 | 218899_s_at | NM_024812 | 15317-15327 |
| 203680_at | NM_002736 | 3668-3678 | 218974_at | NM_018013 | 15328-15338 |
| 203691_at | NM_002638 | 3679-3689 | 218990_s_at | NM_005416 | 15339-15349 |
| 203699_s_at | U53506 | 3690-3700 | 219014_at | NM_016619 | 15350-15360 |
| 203724_s_at | NM_014961 | 3701-3711 | 219059_s_at | AL574194 | 15361-15371 |
| 203747_at | NM_004925 | 3712-3722 | 219087_at | NM_017680 | 15372-15382 |
| 203757_s_at | BC005008 | 3723-3733 | 219106_s_at | NM_006063 | 15383-15393 |
| 203771_s_at | AA740186 | 3734-3744 | 219107_at | NM_021948 | 15394-15404 |
| 203773_x_at | NM_000712 | 3745-3755 | 219121_s_at | NM_017697 | 15405-15415 |
| 203779_s_at | NM_005797 | 3756-3766 | 219183_s_at | NM_013385 | 15416-15426 |
| 203806_s_at | NM_000135 | 3767-3777 | 219186_at | NM_020224 | 15427-15437 |
| 203819_s_at | AU160004 | 3778-3788 | 219190_s_at | NM_017629 | 15438-15448 |
| 203824_at | NM_004616 | 3789-3799 | 219196_at | NM_013243 | 15449-15459 |
| 203843_at | AA906056 | 3800-3810 | 219197_s_at | AI424243 | 15460-15470 |
| 203844_at | NM_000551 | 3811-3821 | 219255_x_at | NM_018725 | 15471-15481 |
| 203851_at | NM_002178 | 3822-3832 | 219263_at | NM_024539 | 15482-15492 |
| 203861_s_at | AU146889 | 3833-3843 | 219271_at | NM_024572 | 15493-15503 |
| 203868_s_at | NM_001078 | 3844-3854 | 219274_at | NM_012338 | 15504-15514 |
| 203872_at | NM_001100 | 3855-3865 | 219288_at | NM_020685 | 260-270 |
| 203876_s_at | AI761713 | 3866-3876 | 219331_s_at | NM_018203 | 15515-15525 |
| 203889_at | NM_003020 | 3877-3887 | 219355_at | NM_018015 | 15526-15536 |
| 203892_at | NM_006103 | 3888-3898 | 219388_at | NM_024915 | 15537-15547 |
| 203895_at | AL535113 | 67-77 | 219404_at | NM_024526 | 15548-15558 |
| 203903_s_at | NM_014799 | 3899-3909 | 219412_at | NM_022337 | 15559-15569 |
| 203913_s_at | AL574184 | 3910-3920 | 219415_at | NM_020659 | 15570-15580 |
| 203914_x_at | NM_000860 | 3921-3931 | 219429_at | NM_024306 | 439-449 |
| 203929_s_at | AI056359 | 3932-3942 | 219434_at | NM_018643 | 15581-15591 |
| 203935_at | NM_001105 | 3943-3953 | 219465_at | NM_001643 | 15592-15602 |
| 203946_s_at | U75667 | 3954-3964 | 219466_s_at | NM_001643 | 15603-15613 |
| 203951_at | NM_001299 | 3965-3975 | 219508_at | NM_004751 | 15614-15624 |
| 203953_s_at | BE791251 | 3976-3986 | 219529_at | NM_004669 | 15625-15635 |
| 203954_x_at | NM_001306 | 3987-3997 | 219532_at | NM_022726 | 15636-15646 |
| 203961_at | AL157398 | 3998-4008 | 219554_at | NM_016321 | 15647-15657 |
| 203962_s_at | NM_006393 | 4009-4019 | 219564_at | NM_018658 | 15658-15668 |
| 203963_at | NM_001218 | 4020-4030 | 219580_s_at | NM_024780 | 15669-15679 |
| 203964_at | NM_004688 | 4031-4041 | 219591_at | NM_016564 | 15680-15690 |
| 203980_at | NM_001442 | 4042-4052 | 219597_s_at | NM_017434 | 15691-15701 |
| 204009_s_at | W80678 | 4053-4063 | 219612_s_at | NM_000509 | 15702-15712 |
| 204014_at | NM_001394 | 4064-4074 | 219630_at | NM_005764 | 15713-15722 |
| 204035_at | NM_003469 | 4075-4085 | 219643_at | NM_018557 | 15723-15733 |
| 204036_at | AW269335 | 4086-4096 | 219659_at | AU146927 | 15734-15744 |
| 204037_at | BF055366 | 4097-4107 | 219727_at | NM_014080 | 15745-15755 |
| 204038_s_at | NM_001401 | 4108-4118 | 219728_at | NM_006790 | 15756-15766 |
| 204039_at | NM_004364 | 4119-4129 | 219736_at | NM_018700 | 15767-15777 |
| 204053_x_at | U96180 | 4130-4140 | 219756_s_at | NM_024921 | 15778-15788 |
| 204058_at | AL049699 | 4141-4151 | 219764_at | NM_007197 | 15789-15799 |
| 204059_s_at | NM_002395 | 4152-4162 | 219772_s_at | NM_014332 | 15800-15810 |
| 204069_at | NM_002398 | 4163-4173 | 219775_s_at | NM_024695 | 15811-15821 |
| 204073_s_at | NM_013279 | 4174-4184 | 219795_at | NM_007231 | 15822-15832 |
| 204081_at | NM_006176 | 4185-4195 | 219803_at | NM_014495 | 15833-15843 |
| 204083_s_at | NM_003289 | 4196-4206 | 219804_at | NM_024875 | 15844-15854 |
| 204086_at | NM_006115 | 4207-4217 | 219829_at | NM_012278 | 15855-15865 |
| 204089_x_at | NM_006724 | 4218-4228 | 219836_at | NM_024508 | 15866-15876 |
| 204103_at | NM_002984 | 4229-4239 | 219873_at | NM_024027 | 15877-15887 |
| 204124_at | AF146796 | 4240-4250 | 219894_at | NM_019066 | 15888-15898 |
| 204151_x_at | NM_001353 | 4251-4261 | 219896_at | NM_015722 | 15899-15909 |
| 204159_at | NM_001262 | 4262-4272 | 219902_at | NM_017614 | 15910-15920 |
| 204165_at | NM_003931 | 4273-4283 | 219909_at | NM_024302 | 15921-15931 |
| 204171_at | NM_003161 | 4284-4294 | 219914_at | NM_004826 | 15932-15942 |
| 204179_at | NM_005368 | 4295-4305 | 219936_s_at | NM_023915 | 15943-15953 |
| 204192_at | NM_001774 | 4306-4316 | 219948_x_at | NM_024743 | 15954-15964 |
| 204201_s_at | NM_006264 | 4317-4327 | 219949_at | NM_024512 | 15965-15975 |
| 204225_at | NM_006037 | 4328-4338 | 219954_s_at | NM_020973 | 15976-15986 |
| 204247_s_at | NM_004935 | 4339-4349 | 219993_at | NM_022454 | 15987-15997 |
| 204248_at | NM_002067 | 4350-4360 | 219995_s_at | NM_024702 | 15998-16008 |
| 204252_at | M68520 | 4361-4371 | 220013_at | NM_024794 | 16009-16019 |
| 204254_s_at | NM_000376 | 4372-4382 | 220017_x_at | NM_000771 | 16020-16023 |
| 204259_at | NM_002423 | 4383-4393 | 220026_at | NM_012128 | 16024-16034 |
| 204260_at | NM_001819 | 4394-4404 | 220035_at | NM_024923 | 16035-16045 |
| 204268_at | NM_005978 | 4405-4415 | 220037_s_at | NM_016164 | 16046-16056 |
| 204272_at | NM_006149 | 4416-4426 | 220056_at | NM_021258 | 16057-16067 |
| 204273_at | NM_000115 | 4427-4437 | 220057_at | NM_020411 | 16068-16078 |
| 204320_at | NM_001854 | 4438-4448 | 220059_at | NM_012108 | 16079-16089 |
| 204337_at | AL514445 | 4449-4459 | 220074_at | NM_017717 | 16090-16100 |
| 204359_at | NM_013231 | 4460-4470 | 220084_at | NM_018168 | 16101-16111 |
| 204363_at | NM_001993 | 4471-4481 | 220100_at | NM_018484 | 16112-16122 |
| 204378_at | NM_003657 | 4482-4492 | 220106_at | NM_013389 | 16123-16133 |
| 204379_s_at | NM_000142 | 4493-4503 | 220116_at | NM_021614 | 16134-16144 |
| 204393_s_at | NM_001099 | 4504-4514 | 220148_at | NM_022568 | 16145-16155 |
| 204412_s_at | NM_021076 | 4515-4525 | 220187_at | NM_024636 | 16156-16166 |
| 204420_at | BG251266 | 4526-4536 | 220191_at | NM_019617 | 16167-16177 |
| 204424_s_at | AL050152 | 4537-4547 | 220196_at | NM_024690 | 16178-16188 |
| 204437_s_at | NM_016725 | 4548-4558 | 220224_at | NM_017545 | 16189-16199 |
| 204450_x_at | NM_000039 | 4559-4569 | 220233_at | NM_024907 | 16200-16210 |
| 204454_at | NM_012317 | 4570-4580 | 220260_at | NM_018317 | 16211-16221 |
| 204455_at | NM_001723 | 4581-4591 | 220273_at | NM_014443 | 16222-16232 |
| 204456_s_at | AW611727 | 4592-4602 | 220275_at | NM_022034 | 16233-16243 |
| 204460_s_at | AF074717 | 4603-4613 | 220316_at | NM_022123 | 16244-16254 |
| 204465_s_at | NM_004692 | 4614-4624 | 220359_s_at | NM_016300 | 16255-16265 |
| 204466_s_at | BG260394 | 4625-4635 | 220392_at | NM_022659 | 16266-16276 |
| 204467_s_at | NM_000345 | 4636-4646 | 220393_at | NM_016571 | 16277-16287 |
| 204469_at | NM_002851 | 4647-4657 | 220414_at | NM_017422 | 16288-16298 |
| 204471_at | NM_002045 | 4658-4668 | 220421_at | NM_024850 | 16299-16309 |
| 204489_s_at | NM_000610 | 4669-4679 | 220468_at | NM_025047 | 16310-16320 |
| 204490_s_at | M24915 | 4680-4690 | 220502_s_at | NM_022444 | 16321-16331 |
| 204503_at | NM_001988 | 4691-4701 | 220542_s_at | NM_016583 | 16332-16342 |
| 204508_s_at | BC001012 | 4702-4712 | 220620_at | NM_019060 | 16343-16353 |
| 204532_x_at | NM_021027 | 4713-4723 | 220639_at | NM_024795 | 16354-16364 |
| 204534_at | NM_000638 | 4724-4734 | 220645_at | NM_017678 | 16365-16375 |
| 204537_s_at | NM_004961 | 4735-4745 | 220658_s_at | NM_020183 | 450-460 |
| 204548_at | NM_000349 | 4746-4756 | 220664_at | NM_006518 | 16376-16386 |
| 204551_s_at | NM_001622 | 4757-4767 | 220723_s_at | NM_025087 | 16387-16397 |
| 204561_x_at | NM_000483 | 4768-4778 | 220724_at | NM_025087 | 16398-16408 |
| 204579_at | NM_002011 | 4779-4789 | 220751_s_at | NM_016348 | 16409-16419 |
| 204581_at | NM_001771 | 4790-4800 | 220773_s_at | NM_020806 | 16420-16430 |
| 204582_s_at | NM_001648 | 4801-4811 | 220779_at | NM_016233 | 16431-16441 |
| 204583_x_at | U17040 | 4812-4822 | 220816_at | NM_012152 | 16442-16452 |
| 204602_at | NM_012242 | 4823-4833 | 220834_at | NM_017716 | 16453-16463 |
| 204612_at | NM_006823 | 4834-4844 | 220994_s_at | NM_014178 | 16464-16474 |
| 204614_at | NM_002575 | 4845-4855 | 221003_s_at | NM_030925 | 16475-16485 |
| 204623_at | NM_003226 | 4856-4866 | 221009_s_at | NM_016109 | 16486-16496 |
| 204631_at | NM_017534 | 4867-4877 | 221132_at | NM_016369 | 16497-16507 |
| 204636_at | NM_000494 | 4878-4888 | 221133_s_at | NM_016369 | 16508-16518 |
| 204653_at | BF343007 | 4889-4899 | 221204_s_at | NM_018058 | 16519-16529 |
| 204654_s_at | NM_003220 | 4900-4910 | 221215_s_at | NM_020639 | 16530-16540 |
| 204661_at | NM_001803 | 4911-4921 | 221236_s_at | NM_030795 | 16541-16551 |
| 204667_at | NM_004496 | 4922-4932 | 221239_s_at | NM_030764 | 16552-16562 |
| 204673_at | NM_002457 | 4933-4943 | 221241_s_at | NM_030766 | 16563-16573 |
| 204678_s_at | U90065 | 4944-4954 | 221424_s_at | NM_030774 | 16574-16584 |
| 204697_s_at | NM_001275 | 4955-4965 | 221530_s_at | BE857425 | 16585-16595 |
| 204713_s_at | AA910306 | 4966-4976 | 221539_at | AB044548 | 16596-16606 |
| 204714_s_at | NM_000130 | 4977-4987 | 221571_at | AI721219 | 16607-16617 |
| 204724_s_at | NM_001853 | 4988-4998 | 221577_x_at | AF003934 | 16618-16628 |
| 204725_s_at | NM_006153 | 4999-5009 | 221602_s_at | AF057557 | 16629-16639 |
| 204733_at | NM_002774 | 5010-5020 | 221623_at | AF229053 | 16640-16650 |
| 204734_at | NM_002275 | 5021-5031 | 221651_x_at | BC005332 | 16651-16659 |
| 204736_s_at | NM_001897 | 5032-5042 | 221671_x_at | M63438 | 16660-16660 |
| 204769_s_at | M74447 | 5043-5053 | 221718_s_at | M90360 | 373-383 |
| 204776_at | NM_003248 | 5054-5064 | 221795_at | AI346341 | 16661-16671 |
| 204777_s_at | NM_002371 | 5065-5075 | 221796_at | AA707199 | 16672-16682 |
| 204810_s_at | NM_001824 | 5076-5086 | 221854_at | AI378979 | 16683-16693 |
| 204811_s_at | NM_006030 | 5087-5097 | 221861_at | AL157484 | 16694-16704 |
| 204818_at | NM_002153 | 5098-5108 | 221879_at | AA886335 | 16705-16715 |
| 204836_at | NM_000170 | 5109-5119 | 221900_at | AI806793 | 16716-16726 |
| 204844_at | L12468 | 5120-5130 | 221950_at | AI478455 | 16727-16737 |
| 204845_s_at | NM_001977 | 5131-5141 | 222008_at | NM_001851 | 16738-16748 |
| 204850_s_at | NM_000555 | 5142-5152 | 222020_s_at | AW117456 | 16749-16759 |
| 204851_s_at | AF040254 | 5153-5163 | 222023_at | AK022014 | 16760-16770 |
| 204854_at | NM_014262 | 5164-5174 | 222024_s_at | AK022014 | 16771-16781 |
| 204855_at | NM_002639 | 5175-5185 | 222071_s_at | BE552428 | 16782-16792 |
| 204859_s_at | NM_013229 | 5186-5196 | 222083_at | AW024233 | 16793-16803 |
| 204869_at | AL031664 | 5197-5207 | 222103_at | AI434345 | 16804-16814 |
| 204870_s_at | NM_002594 | 5208-5218 | 222242_s_at | AF243527 | 16815-16825 |
| 204874_x_at | NM_003933 | 5219-5229 | 222281_s_at | AW517716 | 16826-16836 |
| 204885_s_at | NM_005823 | 5230-5240 | 222294_s_at | AW971415 | 16837-16847 |
| 204931_at | NM_003206 | 5241-5251 | 222325_at | AW974812 | 16848-16858 |
| 204942_s_at | NM_000695 | 5252-5262 | 222334_at | AW979289 | 16859-16869 |
| 204951_at | NM_004310 | 5263-5273 | 222392_x_at | AJ251830 | 16870-16880 |
| 204952_at | NM_014400 | 5274-5284 | 222547_at | AL561281 | 16881-16891 |
| 204955_at | NM_006307 | 5285-5295 | 222548_s_at | AL561281 | 16892-16902 |
| 204960_at | NM_005608 | 5296-5306 | 222592_s_at | AW173691 | 16903-16913 |
| 204961_s_at | NM_000265 | 5307-5317 | 222675_s_at | AA628400 | 16914-16924 |
| 204965_at | NM_000583 | 5318-5328 | 222712_s_at | AW451240 | 16925-16935 |
| 204971_at | NM_005213 | 5329-5339 | 222764_at | AI928342 | 16936-16946 |
| 204987_at | NM_002216 | 5340-5350 | 222773_s_at | AA554045 | 16947-16957 |
| 204988_at | NM_005141 | 5351-5361 | 222780_s_at | AI870583 | 16958-16968 |
| 204995_at | AL567411 | 5362-5372 | 222797_at | BF508726 | 16969-16979 |
| 205009_at | NM_003225 | 5373-5383 | 222830_at | BE566136 | 16980-16990 |
| 205033_s_at | NM_004084 | 5384-5394 | 222861_x_at | NM_012168 | 16991-17001 |
| 205040_at | NM_000607 | 5395-5405 | 222871_at | BF791631 | 17002-17012 |
| 205041_s_at | NM_000607 | 5406-5416 | 222892_s_at | AI087937 | 17013-17023 |
| 205043_at | NM_000492 | 5417-5427 | 222901_s_at | AF153815 | 17024-17034 |
| 205049_s_at | NM_001783 | 5428-5438 | 222904_s_at | AW469181 | 17035-17045 |
| 205064_at | NM_003125 | 5439-5449 | 222912_at | BE207758 | 17046-17056 |
| 205066_s_at | NM_006208 | 5450-5460 | 222919_at | AA192306 | 17057-17067 |
| 205081_at | NM_001311 | 5461-5471 | 222920_s_at | BG231515 | 17068-17078 |
| 205102_at | NM_005656 | 5472-5482 | 222938_x_at | AI685421 | 17079-17089 |
| 205103_at | NM_006365 | 5483-5493 | 222939_s_at | N30257 | 17090-17100 |
| 205108_s_at | NM_000384 | 5494-5504 | 222943_at | AW235567 | 17101-17111 |
| 205109_s_at | NM_015320 | 5505-5515 | 223049_at | AF246238 | 17112-17122 |
| 205114_s_at | NM_002983 | 5516-5526 | 223121_s_at | AW003584 | 17123-17133 |
| 205122_at | BF439316 | 5527-5537 | 223122_s_at | AF311912 | 111-121 |
| 205127_at | NM_000962 | 5538-5548 | 223199_at | AA404592 | 17134-17144 |
| 205128_x_at | NM_000962 | 5549-5559 | 223232_s_at | AI768894 | 17145-17155 |
| 205132_at | NM_005159 | 5560-5570 | 223278_at | M86849 | 17156-17166 |
| 205143_at | NM_004386 | 5571-5581 | 223319_at | AF272663 | 17167-17177 |
| 205152_at | AI003579 | 5582-5592 | 223423_at | BC000181 | 17178-17188 |
| 205157_s_at | NM_000422 | 5593-5603 | 223437_at | N48315 | 17189-17199 |
| 205161_s_at | NM_003847 | 5604-5614 | 223447_at | AY007243 | 17200-17210 |
| 205163_at | NM_013292 | 5615-5625 | 223467_at | AF069506 | 17211-17221 |
| 205177_at | NM_003281 | 5626-5636 | 223496_s_at | AL136609 | 17222-17232 |
| 205185_at | NM_006846 | 5637-5647 | 223536_at | AL136559 | 17233-17243 |
| 205189_s_at | NM_000136 | 5648-5658 | 223551_at | AF225513 | 17244-17254 |
| 205190_at | NM_002670 | 5659-5669 | 223557_s_at | AB017269 | 17255-17265 |
| 205200_at | NM_003278 | 5670-5680 | 223572_at | AB042554 | 17266-17276 |
| 205213_at | NM_014716 | 5681-5691 | 223579_s_at | AF119905 | 17277-17287 |
| 205216_s_at | NM_000042 | 5692-5702 | 223582_at | AF055084 | 17288-17298 |
| 205220_at | NM_006018 | 5703-5713 | 223597_at | AB036706 | 17299-17309 |
| 205222_at | NM_001966 | 5714-5724 | 223603_at | AB026054 | 17310-17320 |
| 205225_at | NM_000125 | 5725-5735 | 223610_at | BC002776 | 17321-17331 |
| 205234_at | NM_004696 | 5736-5746 | 223623_at | AF325503 | 17332-17342 |
| 205239_at | NM_001657 | 5747-5757 | 223631_s_at | AF213678 | 17343-17353 |
| 205249_at | NM_000399 | 5758-5768 | 223634_at | AF279143 | 17354-17364 |
| 205253_at | NM_002585 | 5769-5779 | 223673_at | AF332192 | 17365-17375 |
| 205257_s_at | NM_001635 | 5780-5790 | 223678_s_at | M13686 | 17376-17386 |
| 205261_at | NM_002630 | 5791-5801 | 223687_s_at | AA723810 | 17387-17397 |
| 205266_at | NM_002309 | 5802-5812 | 223694_at | AF220032 | 17398-17408 |
| 205267_at | NM_006235 | 5813-5823 | 223708_at | AF329838 | 17409-17419 |
| 205286_at | U85658 | 5824-5834 | 223741_s_at | BC004233 | 17420-17430 |
| 205297_s_at | NM_000626 | 5835-5845 | 223749_at | AF329836 | 17431-17441 |
| 205302_at | NM_000596 | 5846-5856 | 223750_s_at | AW665250 | 17442-17452 |
| 205313_at | NM_000458 | 5857-5867 | 223751_x_at | AF296673 | 17453-17463 |
| 205319_at | NM_005672 | 5868-5878 | 223753_s_at | AF312769 | 17464-17474 |
| 205320_at | NM_005883 | 5879-5889 | 223754_at | BC005083 | 17475-17485 |
| 205337_at | AL139318 | 5890-5900 | 223784_at | AF229179 | 17486-17496 |
| 205343_at | NM_001056 | 5901-5911 | 223786_at | AF280086 | 17497-17507 |
| 205344_at | NM_006574 | 5912-5922 | 223806_s_at | AF090386 | 17508-17518 |
| 205348_s_at | NM_004411 | 5923-5933 | 223810_at | AF252283 | 17519-17529 |
| 205349_at | NM_002068 | 5934-5944 | 223820_at | AY007436 | 17530-17540 |
| 205358_at | NM_000826 | 5945-5955 | 223843_at | AB007830 | 17541-17551 |
| 205363_at | NM_003986 | 5956-5966 | 223864_at | AF269087 | 17552-17562 |
| 205373_at | NM_004389 | 5967-5977 | 223877_at | AF329839 | 17563-17573 |
| 205380_at | NM_002614 | 5978-5988 | 223913_s_at | AB058892 | 17574-17584 |
| 205382_s_at | NM_001928 | 5989-5999 | 223969_s_at | AF323084 | 17585-17595 |
| 205388_at | NM_003279 | 6000-6010 | 224146_s_at | AF352582 | 17596-17606 |
| 205390_s_at | NM_000037 | 6011-6021 | 224179_s_at | AF230095 | 17607-17617 |
| 205402_x_at | NM_002770 | 6022-6032 | 224204_x_at | AF231339 | 17618-17625 |
| 205413_at | NM_001584 | 6033-6043 | 224209_s_at | AF019638 | 17626-17636 |
| 205417_s_at | NM_004393 | 195-205 | 224329_s_at | AB049591 | 17637-17647 |
| 205422_s_at | NM_004791 | 6044-6054 | 224342_x_at | L14452 | 17648-17657 |
| 205430_at | AL133386 | 6055-6065 | 224355_s_at | AF237905 | 17658-17668 |
| 205433_at | NM_000055 | 6066-6076 | 224361_s_at | AF250309 | 17669-17676 |
| 205444_at | NM_004320 | 6077-6087 | 224367_at | AF251053 | 17677-17687 |
| 205473_at | NM_001692 | 6088-6098 | 224393_s_at | AF307451 | 17688-17698 |
| 205475_at | NM_007281 | 6099-6109 | 224396_s_at | AF316824 | 17699-17709 |
| 205476_at | NM_004591 | 6110-6120 | 224428_s_at | AY029179 | 17710-17720 |
| 205477_s_at | NM_001633 | 6121-6131 | 224458_at | BC006115 | 17721-17731 |
| 205485_at | NM_000540 | 6132-6142 | 224476_s_at | BC006219 | 17732-17742 |
| 205487_s_at | NM_016267 | 6143-6153 | 224482_s_at | BC006240 | 17743-17753 |
| 205490_x_at | BF060667 | 6154-6164 | 224488_s_at | BC006262 | 17754-17764 |
| 205500_at | NM_001735 | 6165-6175 | 224499_s_at | BC006296 | 17765-17775 |
| 205504_at | NM_000061 | 6176-6186 | 224506_s_at | BC006362 | 17776-17786 |
| 205506_at | NM_007127 | 6187-6197 | 224560_at | BF107565 | 17787-17797 |
| 205509_at | NM_001871 | 6198-6208 | 224590_at | BE644917 | 17798-17808 |
| 205513_at | NM_001062 | 6209-6219 | 224650_at | AL117612 | 17809-17819 |
| 205517_at | AV700724 | 6220-6230 | 224681_at | BG028884 | 17820-17830 |
| 205523_at | U43328 | 6231-6241 | 224793_s_at | AA604375 | 17831-17841 |
| 205524_s_at | NM_001884 | 6242-6252 | 224813_at | AL523820 | 17842-17852 |
| 205532_s_at | AU151483 | 6253-6263 | 224823_at | AA526844 | 17853-17863 |
| 205544_s_at | NM_001877 | 6264-6274 | 224861_at | AA628423 | 17864-17874 |
| 205549_at | NM_006198 | 6275-6285 | 224862_at | BF969428 | 17875-17885 |
| 205564_at | NM_007003 | 6286-6296 | 224891_at | AV725666 | 17886-17896 |
| 205576_at | NM_000185 | 6297-6307 | 224918_x_at | AI220117 | 17897-17907 |
| 205577_at | NM_005609 | 6308-6318 | 224935_at | BG165815 | 17908-17918 |
| 205582_s_at | NM_004121 | 6319-6329 | 225016_at | N48299 | 17919-17929 |
| 205595_at | NM_001944 | 6330-6340 | 225093_at | N66570 | 17930-17940 |
| 205597_at | NM_025257 | 6341-6351 | 225144_at | AI457436 | 17941-17951 |
| 205606_at | NM_002336 | 6352-6362 | 225147_at | AL521959 | 17952-17962 |
| 205615_at | NM_001868 | 6363-6373 | 225211_at | AW139723 | 17963-17973 |
| 205623_at | NM_000691 | 6374-6384 | 225262_at | AI670862 | 17974-17984 |
| 205624_at | NM_001870 | 6385-6395 | 225275_at | AA053711 | 17985-17995 |
| 205626_s_at | NM_004929 | 6396-6406 | 225285_at | AK025615 | 17996-18006 |
| 205630_at | NM_000756 | 6407-6417 | 225330_at | AL044092 | 18007-18017 |
| 205632_s_at | NM_003558 | 6418-6428 | 225380_at | BF528878 | 18018-18028 |
| 205638_at | NM_001704 | 6429-6439 | 225433_at | AU144104 | 18029-18039 |
| 205649_s_at | NM_000508 | 6440-6450 | 225482_at | AL533416 | 18040-18050 |
| 205650_s_at | NM_021871 | 6451-6461 | 225491_at | AL157452 | 18051-18061 |
| 205654_at | NM_000715 | 6462-6472 | 225558_at | R38084 | 18062-18072 |
| 205670_at | NM_004861 | 6473-6483 | 225609_at | AI888037 | 18073-18083 |
| 205674_x_at | NM_001680 | 6484-6494 | 225645_at | AI763378 | 18084-18094 |
| 205675_at | AI623321 | 6495-6505 | 225667_s_at | AI601101 | 18095-18105 |
| 205676_at | NM_000785 | 6506-6516 | 225728_at | AI659533 | 18106-18116 |
| 205683_x_at | NM_003294 | 6517-6527 | 225745_at | AV725248 | 18117-18127 |
| 205693_at | NM_006757 | 6528-6538 | 225757_s_at | AU147564 | 18128-18138 |
| 205698_s_at | NM_002758 | 6539-6549 | 225809_at | AI659927 | 18139-18149 |
| 205710_at | NM_004525 | 6550-6560 | 225835_at | AK025062 | 18150-18160 |
| 205719_s_at | NM_000277 | 6561-6571 | 225846_at | BF001941 | 18161-18171 |
| 205721_at | U97145 | 6572-6582 | 225859_at | N30645 | 18172-18182 |
| 205724_at | NM_000299 | 6583-6593 | 225911_at | AL138410 | 18183-18193 |
| 205725_at | NM_003357 | 6594-6604 | 225958_at | AI554106 | 18194-18204 |
| 205728_at | AL022718 | 6605-6615 | 225985_at | AI935917 | 18205-18215 |
| 205736_at | NM_000290 | 6616-6626 | 225987_at | AA650281 | 18216-18226 |
| 205737_at | NM_004518 | 6627-6637 | 225996_at | AV709727 | 18227-18237 |
| 205753_at | NM_000567 | 6638-6648 | 226048_at | N92719 | 18238-18248 |
| 205754_at | NM_000506 | 6649-6659 | 226066_at | AL117653 | 18249-18259 |
| 205755_at | NM_002217 | 6660-6670 | 226067_at | AL355392 | 18260-18270 |
| 205767_at | NM_001432 | 6671-6681 | 226068_at | BF593625 | 18271-18281 |
| 205770_at | NM_000637 | 6682-6692 | 226084_at | AA554833 | 18282-18292 |
| 205778_at | NM_005046 | 6693-6703 | 226096_at | AI760132 | 18293-18303 |
| 205780_at | NM_001197 | 6704-6714 | 226189_at | BF513121 | 18304-18314 |
| 205792_at | NM_003881 | 6715-6725 | 226210_s_at | AI291123 | 18315-18325 |
| 205799_s_at | M95548 | 6726-6736 | 226213_at | AV681807 | 18326-18336 |
| 205809_s_at | BE504979 | 6737-6747 | 226216_at | W84556 | 18337-18347 |
| 205813_s_at | NM_000429 | 6748-6758 | 226226_at | AI282982 | 18348-18358 |
| 205815_at | NM_002580 | 6759-6769 | 226228_at | T15657 | 18359-18369 |
| 205817_at | NM_005982 | 6770-6780 | 226281_at | BF059512 | 18370-18380 |
| 205819_at | NM_006770 | 6781-6791 | 226342_at | AW593244 | 18381-18391 |
| 205820_s_at | NM_000040 | 6792-6802 | 226424_at | AI683754 | 18392-18402 |
| 205822_s_at | NM_002130 | 6803-6813 | 226461_at | AA204719 | 18403-18413 |
| 205825_at | NM_000439 | 6814-6824 | 226462_at | AW134979 | 18414-18424 |
| 205827_at | NM_000729 | 6825-6835 | 226498_at | AA149648 | 18425-18435 |
| 205828_at | NM_002422 | 6836-6846 | 226517_at | AL390172 | 18436-18446 |
| 205833_s_at | AI770098 | 6847-6857 | 226534_at | AI446414 | 18447-18457 |
| 205842_s_at | AF001362 | 6858-6868 | 226535_at | AK026736 | 18458-18468 |
| 205844_at | NM_004666 | 6869-6879 | 226553_at | AI660243 | 18469-18479 |
| 205856_at | NM_015865 | 6880-6890 | 226554_at | AW445134 | 18480-18490 |
| 205860_x_at | NM_004476 | 6891-6901 | 226560_at | AA576959 | 18491-18501 |
| 205861_at | NM_003121 | 6902-6912 | 226623_at | AI829726 | 18502-18512 |
| 205866_at | NM_003665 | 6913-6923 | 226654_at | AF147790 | 18513-18523 |
| 205869_at | NM_002769 | 6924-6934 | 226675_s_at | W80468 | 18524-18534 |
| 205886_at | NM_006507 | 6935-6945 | 226690_at | AW451961 | 18535-18545 |
| 205893_at | NM_014932 | 6946-6956 | 226755_at | AI375939 | 18546-18556 |
| 205899_at | NM_003914 | 6957-6967 | 226766_at | AB046788 | 18557-18567 |
| 205900_at | NM_006121 | 6968-6978 | 226777_at | AA147933 | 18568-18578 |
| 205901_at | NM_006228 | 6979-6989 | 226852_at | AB033092 | 18579-18589 |
| 205902_at | AJ251016 | 6990-7000 | 226856_at | BF793701 | 18590-18600 |
| 205906_at | NM_001454 | 7001-7011 | 226863_at | AI674565 | 18601-18611 |
| 205912_at | NM_000936 | 7012-7022 | 226864_at | BF245954 | 18612-18622 |
| 205913_at | NM_002666 | 7023-7033 | 226907_at | N32557 | 18623-18633 |
| 205916_at | NM_002963 | 7034-7044 | 226913_s_at | BF527050 | 18634-18644 |
| 205924_at | BC005035 | 7045-7055 | 226930_at | AI345957 | 18645-18655 |
| 205925_s_at | NM_002867 | 7056-7066 | 226960_at | AW471176 | 18656-18666 |
| 205927_s_at | NM_001910 | 7067-7077 | 226978_at | AA910945 | 18667-18677 |
| 205929_at | NM_005814 | 7078-7088 | 227030_at | BG231773 | 18678-18688 |
| 205932_s_at | NM_002448 | 7089-7099 | 227048_at | AI990816 | 18689-18699 |
| 205940_at | NM_002470 | 7100-7110 | 227084_at | AW339310 | 18700-18710 |
| 205941_s_at | AI376003 | 7111-7121 | 227099_s_at | AW276078 | 18711-18721 |
| 205951_at | NM_005963 | 7122-7132 | 227123_at | AU156710 | 18722-18732 |
| 205954_at | NM_006917 | 7133-7143 | 227140_at | AI343467 | 18733-18743 |
| 205959_at | NM_002427 | 7144-7154 | 227143_s_at | AA706658 | 122-132 |
| 205969_at | NM_001086 | 7155-7165 | 227156_at | AK025872 | 18744-18754 |
| 205971_s_at | NM_001906 | 7166-7176 | 227168_at | BF475488 | 18755-18765 |
| 205972_at | NM_006841 | 7177-7187 | 227174_at | Z98443 | 18766-18776 |
| 205978_at | NM_004795 | 7188-7198 | 227180_at | AW138767 | 18777-18787 |
| 205979_at | NM_002407 | 7199-7209 | 227183_at | AI417267 | 18788-18798 |
| 205980_s_at | NM_015366 | 7210-7220 | 227198_at | AW085505 | 18799-18809 |
| 205982_x_at | NM_003018 | 7221-7231 | 227238_at | W93847 | 18810-18820 |
| 205983_at | NM_004413 | 7232-7242 | 227241_at | R79759 | 18821-18831 |
| 205999_x_at | AF182273 | 7243-7253 | 227282_at | AB037734 | 18832-18842 |
| 206000_at | NM_005588 | 7254-7264 | 227318_at | AL359605 | 18843-18853 |
| 206001_at | NM_000905 | 7265-7275 | 227336_at | AW576405 | 18854-18864 |
| 206002_at | NM_005756 | 7276-7286 | 227376_at | AW021102 | 18865-18875 |
| 206008_at | NM_000359 | 7287-7297 | 227394_at | W94001 | 18876-18886 |
| 206018_at | NM_005249 | 7298-7308 | 227397_at | AA531086 | 18887-18897 |
| 206022_at | NM_000266 | 7309-7319 | 227401_at | BE856748 | 18898-18908 |
| 206023_at | NM_006681 | 7320-7330 | 227426_at | AV702692 | 18909-18919 |
| 206030_at | NM_000049 | 7331-7341 | 227449_at | AI799018 | 18920-18930 |
| 206032_at | AI797281 | 7342-7352 | 227475_at | AI676059 | 18931-18941 |
| 206033_s_at | NM_001941 | 7353-7363 | 227510_x_at | AL037917 | 18942-18952 |
| 206054_at | NM_000893 | 7364-7374 | 227522_at | AA209487 | 18953-18963 |
| 206065_s_at | NM_001385 | 7375-7385 | 227550_at | AW242720 | 18964-18974 |
| 206067_s_at | NM_024426 | 7386-7396 | 227556_at | AI094580 | 18975-18985 |
| 206075_s_at | NM_001895 | 7397-7407 | 227566_at | AW085558 | 18986-18996 |
| 206106_at | AL022328 | 7408-7418 | 227612_at | R20763 | 18997-19007 |
| 206115_at | NM_004430 | 7419-7429 | 227614_at | W81116 | 19008-19018 |
| 206117_at | NM_000366 | 7430-7440 | 227629_at | AA843963 | 19019-19029 |
| 206119_at | NM_001713 | 7441-7451 | 227662_at | AA541622 | 19030-19040 |
| 206122_at | NM_006942 | 7452-7462 | 227676_at | AW001287 | 19041-19051 |
| 206125_s_at | NM_007196 | 7463-7473 | 227677_at | BF512748 | 19052-19062 |
| 206130_s_at | NM_001181 | 7474-7484 | 227705_at | BF591534 | 19063-19073 |
| 206135_at | NM_014682 | 7485-7495 | 227733_at | AA928939 | 19074-19084 |
| 206143_at | NM_000111 | 7496-7506 | 227735_s_at | AA553959 | 133-143 |
| 206149_at | NM_022097 | 7507-7517 | 227736_at | AA553959 | 144-154 |
| 206151_x_at | NM_007352 | 7518-7528 | 227769_at | AI703476 | 19085-19095 |
| 206156_at | NM_005268 | 7529-7539 | 227798_at | AU146891 | 19096-19106 |
| 206157_at | NM_002852 | 7540-7550 | 227803_at | AA609053 | 19107-19117 |
| 206164_at | NM_006536 | 7551-7561 | 227817_at | R51324 | 19118-19128 |
| 206165_s_at | NM_006536 | 7562-7572 | 227823_at | BE348679 | 19129-19139 |
| 206166_s_at | AF043977 | 7573-7583 | 227826_s_at | AW138143 | 19140-19150 |
| 206167_s_at | NM_001174 | 7584-7594 | 227827_at | AW138143 | 19151-19161 |
| 206177_s_at | NM_000045 | 7595-7605 | 227848_at | AI218954 | 19162-19172 |
| 206179_s_at | NM_007030 | 7606-7616 | 227850_x_at | AW084544 | 19173-19183 |
| 206190_at | NM_005291 | 7617-7627 | 227867_at | AA005361 | 19184-19194 |
| 206191_at | NM_001248 | 7628-7638 | 227892_at | AA855042 | 19195-19205 |
| 206198_s_at | L31792 | 7639-7649 | 227897_at | N20927 | 19206-19216 |
| 206199_at | NM_006890 | 7650-7660 | 227952_at | AI580142 | 19217-19227 |
| 206201_s_at | NM_005924 | 7661-7671 | 227971_at | AI653107 | 19228-19238 |
| 206207_at | NM_001828 | 7672-7682 | 227984_at | BE464483 | 19239-19246 |
| 206209_s_at | NM_000717 | 7683-7693 | 228004_at | AL121722 | 19247-19257 |
| 206210_s_at | NM_000078 | 7694-7704 | 228035_at | AA453640 | 19258-19268 |
| 206226_at | NM_000412 | 7705-7715 | 228038_at | AI669815 | 19269-19279 |
| 206227_at | NM_003613 | 7716-7726 | 228051_at | AI979261 | 19280-19290 |
| 206228_at | AW769732 | 7727-7737 | 228056_s_at | AI763426 | 19291-19301 |
| 206237_s_at | NM_013957 | 7738-7748 | 228133_s_at | BF732767 | 19302-19311 |
| 206239_s_at | NM_003122 | 7749-7759 | 228170_at | AL355743 | 19312-19322 |
| 206242_at | NM_003963 | 7760-7770 | 228173_at | AA810695 | 19323-19333 |
| 206249_at | NM_004721 | 7771-7781 | 228188_at | AI860150 | 19334-19344 |
| 206255_at | NM_001715 | 7782-7792 | 228195_at | BE645119 | 19345-19355 |
| 206259_at | NM_000312 | 7793-7803 | 228232_s_at | NM_014312 | 19356-19366 |
| 206260_at | NM_003241 | 7804-7814 | 228284_at | BE302305 | 19367-19377 |
| 206262_at | NM_000669 | 7815-7825 | 228329_at | AA700440 | 19378-19388 |
| 206268_at | NM_020997 | 7826-7836 | 228335_at | AW264204 | 19389-19399 |
| 206276_at | NM_003695 | 7837-7847 | 228360_at | BF060747 | 19400-19410 |
| 206282_at | NM_002500 | 7848-7858 | 228367_at | BE551416 | 19411-19421 |
| 206286_s_at | NM_003212 | 7859-7869 | 228377_at | AB037805 | 19422-19432 |
| 206287_s_at | NM_002218 | 7870-7880 | 228399_at | AI569974 | 19433-19443 |
| 206292_s_at | NM_003167 | 7881-7891 | 228462_at | AI928035 | 19444-19454 |
| 206293_at | U08024 | 7892-7902 | 228463_at | R99562 | 19455-19465 |
| 206296_x_at | NM_007181 | 7903-7913 | 228481_at | BG541187 | 19466-19476 |
| 206298_at | NM_021226 | 7914-7924 | 228494_at | AI888150 | 19477-19487 |
| 206312_at | NM_004963 | 7925-7935 | 228501_at | BF055343 | 19488-19498 |
| 206334_at | NM_004190 | 7936-7946 | 228504_at | AI828648 | 19499-19509 |
| 206340_at | NM_005123 | 7947-7957 | 228518_at | AW575313 | 19510-19520 |
| 206373_at | NM_003412 | 7958-7968 | 228554_at | AL137566 | 19521-19531 |
| 206376_at | NM_018057 | 7969-7979 | 228575_at | AL578102 | 19532-19542 |
| 206378_at | NM_002411 | 7980-7990 | 228581_at | AW071744 | 19543-19553 |
| 206380_s_at | NM_002621 | 7991-8001 | 228592_at | AW474852 | 19554-19564 |
| 206385_s_at | NM_020987 | 8002-8012 | 228598_at | AL538781 | 19565-19575 |
| 206387_at | U51096 | 8013-8023 | 228608_at | N49852 | 19576-19586 |
| 206393_at | NM_003282 | 8024-8034 | 228621_at | AA948096 | 19587-19597 |
| 206394_at | NM_004533 | 8035-8045 | 228658_at | R54042 | 19598-19608 |
| 206397_x_at | NM_001492 | 8046-8056 | 228670_at | BF197089 | 19609-19619 |
| 206398_s_at | NM_001770 | 8057-8067 | 228715_at | AV725825 | 19620-19630 |
| 206400_at | NM_002307 | 8068-8078 | 228724_at | N49237 | 19631-19641 |
| 206401_s_at | J03778 | 8079-8089 | 228737_at | AA211909 | 19642-19652 |
| 206408_at | NM_015564 | 8090-8100 | 228739_at | AI139413 | 19653-19663 |
| 206418_at | NM_007052 | 8101-8111 | 228780_at | AW149422 | 19664-19674 |
| 206421_s_at | NM_003784 | 8112-8122 | 228794_at | AA211780 | 19675-19685 |
| 206422_at | NM_002054 | 8123-8133 | 228796_at | BE645967 | 19686-19696 |
| 206427_s_at | U06654 | 8134-8144 | 228806_at | AI218580 | 19697-19707 |
| 206430_at | NM_001804 | 8145-8155 | 228834_at | BF240286 | 19708-19718 |
| 206434_at | NM_016950 | 8156-8166 | 228912_at | AI436136 | 19719-19729 |
| 206439_at | NM_004950 | 8167-8177 | 228955_at | AL041761 | 19730-19740 |
| 206446_s_at | NM_001971 | 8178-8188 | 228969_at | AI922323 | 19741-19751 |
| 206447_at | NM_001971 | 8189-8199 | 228979_at | BE218152 | 19752-19762 |
| 206457_s_at | NM_000792 | 8200-8210 | 228984_at | AB037815 | 19763-19773 |
| 206463_s_at | NM_005794 | 8211-8221 | 229030_at | AW242997 | 19774-19784 |
| 206466_at | AB014531 | 8222-8232 | 229088_at | BF591996 | 19785-19795 |
| 206484_s_at | NM_003399 | 8233-8243 | 229095_s_at | AI797263 | 19796-19806 |
| 206496_at | NM_006894 | 8244-8254 | 229096_at | AI797263 | 19807-19817 |
| 206502_s_at | NM_002196 | 8255-8265 | 229147_at | AW070877 | 19818-19828 |
| 206504_at | NM_000782 | 8266-8276 | 229150_at | AI810764 | 19829-19839 |
| 206509_at | NM_002652 | 8277-8287 | 229151_at | BE673587 | 19840-19850 |
| 206515_at | NM_000896 | 8288-8298 | 229160_at | AI967987 | 19851-19861 |
| 206517_at | NM_004062 | 8299-8309 | 229163_at | N75559 | 19862-19872 |
| 206536_s_at | U32974 | 8310-8320 | 229168_at | AI690433 | 19873-19883 |
| 206552_s_at | NM_003182 | 8321-8331 | 229177_at | AI823572 | 19884-19894 |
| 206560_s_at | NM_006533 | 8332-8342 | 229212_at | BE220341 | 19895-19905 |
| 206561_s_at | NM_020299 | 8343-8353 | 229215_at | AI393930 | 19906-19916 |
| 206586_at | NM_001841 | 8354-8364 | 229218_at | AA628535 | 19917-19927 |
| 206642_at | NM_001942 | 8365-8375 | 229221_at | BE467023 | 19928-19938 |
| 206651_s_at | NM_016413 | 8376-8386 | 229229_at | AJ292204 | 19939-19949 |
| 206655_s_at | NM_000407 | 8387-8397 | 229245_at | AA535361 | 19950-19960 |
| 206657_s_at | NM_002478 | 8398-8408 | 229259_at | AL133013 | 19961-19971 |
| 206658_at | NM_030570 | 8409-8419 | 229271_x_at | BG028597 | 19972-19982 |
| 206664_at | NM_001041 | 8420-8430 | 229273_at | AU152837 | 19983-19993 |
| 206680_at | NM_005894 | 8431-8441 | 229281_at | N51682 | 19994-20004 |
| 206681_x_at | NM_001502 | 8442-8452 | 229290_at | AI692575 | 20005-20015 |
| 206687_s_at | NM_002831 | 8453-8463 | 229296_at | AI659477 | 20016-20026 |
| 206690_at | NM_001094 | 8464-8474 | 229300_at | AW590679 | 20027-20037 |
| 206694_at | NM_006229 | 8475-8485 | 229309_at | AI625747 | 20038-20048 |
| 206696_at | NM_000273 | 8486-8496 | 229335_at | BE645821 | 20049-20059 |
| 206698_at | NM_021083 | 8497-8507 | 229358_at | AA628967 | 20060-20070 |
| 206701_x_at | NM_003991 | 8508-8518 | 229374_at | AI758962 | 20071-20081 |
| 206717_at | NM_002472 | 8519-8529 | 229400_at | AW299531 | 20082-20092 |
| 206727_at | K02766 | 8530-8540 | 229459_at | AV723914 | 20093-20103 |
| 206743_s_at | NM_001671 | 8541-8551 | 229476_s_at | AW272342 | 20104-20114 |
| 206750_at | NM_002360 | 8552-8562 | 229477_at | AW272342 | 20115-20125 |
| 206771_at | NM_006953 | 8563-8573 | 229481_at | AI990367 | 20126-20136 |
| 206773_at | NM_002347 | 8574-8584 | 229529_at | AI827830 | 20137-20147 |
| 206775_at | NM_001081 | 8585-8595 | 229540_at | R45471 | 20148-20158 |
| 206797_at | NM_000015 | 8596-8606 | 229542_at | AW590326 | 20159-20169 |
| 206803_at | NM_024411 | 8607-8617 | 229566_at | AA149250 | 20170-20180 |
| 206826_at | NM_002677 | 8618-8628 | 229569_at | AW572379 | 20181-20191 |
| 206827_s_at | NM_014274 | 8629-8639 | 229578_at | AA716165 | 20192-20202 |
| 206836_at | NM_001044 | 8640-8650 | 229580_at | R71596 | 20203-20213 |
| 206858_s_at | NM_004503 | 8651-8661 | 229599_at | AA675917 | 20214-20224 |
| 206869_at | NM_001267 | 8662-8672 | 229638_at | AI681917 | 20225-20235 |
| 206882_at | NM_005071 | 8673-8683 | 229655_at | N66656 | 20236-20246 |
| 206884_s_at | NM_003843 | 8684-8694 | 229734_at | BF507379 | 20247-20257 |
| 206893_at | NM_002968 | 8695-8705 | 229777_at | AA863031 | 20258-20268 |
| 206898_at | NM_021153 | 8706-8716 | 229782_at | BE468066 | 20269-20279 |
| 206912_at | NM_004473 | 8717-8727 | 229799_s_at | AI569787 | 20280-20290 |
| 206913_at | NM_001701 | 8728-8738 | 229800_at | AI129626 | 20291-20301 |
| 206915_at | NM_002509 | 8739-8749 | 229818_at | AL359592 | 20302-20312 |
| 206935_at | NM_002590 | 8750-8760 | 229875_at | AI363193 | 20313-20323 |
| 206963_s_at | NM_016347 | 8761-8771 | 229889_at | AW137009 | 20324-20334 |
| 206975_at | NM_000595 | 8772-8782 | 229921_at | BF196255 | 20335-20345 |
| 206979_at | NM_000066 | 8783-8793 | 229927_at | BE222220 | 20346-20356 |
| 207004_at | NM_000657 | 8794-8804 | 229944_at | AU153412 | 20357-20367 |
| 207010_at | NM_000812 | 8805-8815 | 230022_at | BF057185 | 20368-20378 |
| 207039_at | NM_000077 | 8816-8826 | 230075_at | AV724323 | 20379-20389 |
| 207052_at | NM_012206 | 8827-8837 | 230100_x_at | AU147145 | 20390-20400 |
| 207058_s_at | NM_004562 | 8838-8848 | 230105_at | BF062550 | 20401-20411 |
| 207066_at | NM_002152 | 8849-8859 | 230112_at | AB037820 | 20412-20422 |
| 207069_s_at | NM_005585 | 8860-8870 | 230135_at | AI822137 | 20423-20433 |
| 207074_s_at | NM_003053 | 8871-8881 | 230144_at | AW294729 | 20434-20444 |
| 207086_x_at | NM_001474 | 8882-8892 | 230147_at | AI378647 | 20445-20455 |
| 207093_s_at | NM_002544 | 8893-8903 | 230158_at | AA758751 | 20456-20466 |
| 207121_s_at | NM_002748 | 8904-8914 | 230163_at | AW263087 | 20467-20477 |
| 207134_x_at | NM_024164 | 8915-8915 | 230184_at | AL035834 | 20478-20488 |
| 207139_at | NM_000704 | 8916-8926 | 230188_at | AW138350 | 20489-20499 |
| 207144_s_at | NM_004143 | 8927-8937 | 230193_at | AI479075 | 20500-20510 |
| 207148_x_at | NM_016599 | 8938-8948 | 230220_at | AI681025 | 20511-20521 |
| 207175_at | NM_004797 | 8949-8959 | 230242_at | AA634220 | 20522-20532 |
| 207181_s_at | NM_001227 | 8960-8970 | 230271_at | BG150301 | 20533-20543 |
| 207200_at | NM_000531 | 8971-8981 | 230272_at | AA464844 | 20544-20554 |
| 207202_s_at | NM_003889 | 8982-8992 | 230276_at | AI934342 | 20555-20565 |
| 207203_s_at | AF061056 | 8993-9003 | 230290_at | BE674338 | 20566-20576 |
| 207214_at | NM_014471 | 9004-9014 | 230309_at | BE876610 | 20577-20587 |
| 207217_s_at | NM_013955 | 9015-9025 | 230318_at | T62088 | 20588-20598 |
| 207218_at | NM_000133 | 9026-9036 | 230319_at | AI222435 | 20599-20609 |
| 207233_s_at | NM_000248 | 9037-9047 | 230323_s_at | AW242836 | 20610-20620 |
| 207238_s_at | NM_002838 | 9048-9058 | 230378_at | AA742697 | 20621-20631 |
| 207256_at | NM_000242 | 9059-9069 | 230412_at | BF196935 | 20632-20642 |
| 207259_at | NM_017928 | 9070-9080 | 230432_at | AI733124 | 20643-20653 |
| 207293_s_at | U16957 | 9081-9091 | 230438_at | AI039005 | 20654-20664 |
| 207298_at | NM_006632 | 9092-9102 | 230464_at | AI814092 | 20665-20675 |
| 207300_s_at | NM_000131 | 9103-9113 | 230472_at | AI870306 | 20676-20686 |
| 207302_at | NM_000231 | 9114-9124 | 230496_at | BE046923 | 20687-20697 |
| 207316_at | NM_001523 | 9125-9135 | 230554_at | AV696234 | 20698-20708 |
| 207323_s_at | NM_002385 | 9136-9146 | 230560_at | N21096 | 20709-20719 |
| 207324_s_at | NM_004948 | 9147-9157 | 230577_at | AW014022 | 20720-20730 |
| 207356_at | NM_004942 | 9158-9168 | 230585_at | AI632692 | 20731-20741 |
| 207362_at | NM_013309 | 9169-9179 | 230595_at | BF677651 | 20742-20752 |
| 207380_x_at | NM_013954 | 9180-9190 | 230602_at | AW025340 | 20753-20763 |
| 207384_at | NM_005091 | 9191-9201 | 230673_at | AV706971 | 20764-20774 |
| 207392_x_at | NM_001076 | 9202-9212 | 230741_at | AI655467 | 20775-20785 |
| 207406_at | NM_000780 | 9213-9223 | 230772_at | AA639753 | 20786-20796 |
| 207412_x_at | NM_001808 | 9224-9234 | 230776_at | N59856 | 20797-20807 |
| 207414_s_at | NM_002570 | 9235-9245 | 230781_at | AI143988 | 20808-20818 |
| 207429_at | NM_003058 | 9246-9256 | 230784_at | BG498699 | 20819-20829 |
| 207430_s_at | NM_002443 | 9257-9267 | 230788_at | BF059748 | 20830-20840 |
| 207434_s_at | NM_021603 | 9268-9275 | 230805_at | AA749202 | 20841-20851 |
| 207457_s_at | NM_021246 | 9276-9286 | 230835_at | W69083 | 20852-20862 |
| 207463_x_at | NM_002771 | 9287-9295 | 230863_at | R73030 | 20863-20873 |
| 207469_s_at | NM_003662 | 9296-9306 | 230865_at | N29837 | 20874-20884 |
| 207522_s_at | NM_005173 | 9307-9317 | 230867_at | AI742521 | 20885-20895 |
| 207529_at | NM_021010 | 9318-9328 | 230882_at | AA129217 | 20896-20906 |
| 207544_s_at | NM_000672 | 9329-9339 | 230896_at | AA833830 | 20907-20917 |
| 207558_s_at | NM_000325 | 9340-9350 | 230915_at | AI741629 | 20918-20928 |
| 207591_s_at | NM_006015 | 9351-9361 | 230920_at | BF060736 | 20929-20939 |
| 207612_at | NM_003393 | 9362-9372 | 230923_at | AI824004 | 20940-20950 |
| 207655_s_at | NM_013314 | 9373-9383 | 230942_at | AI147740 | 20951-20961 |
| 207663_x_at | NM_001473 | 9384-9386 | 230943_at | AI821669 | 20962-20972 |
| 207686_s_at | NM_001228 | 9387-9397 | 230980_x_at | AI307713 | 20973-20983 |
| 207695_s_at | NM_001555 | 9398-9408 | 231029_at | AI740541 | 20984-20994 |
| 207738_s_at | NM_013436 | 9409-9419 | 231033_at | AI819863 | 20995-21005 |
| 207739_s_at | NM_001472 | 9420-9428 | 231040_at | AW512988 | 21006-21016 |
| 207741_x_at | NM_003293 | 9429-9436 | 231063_at | AW014518 | 21017-21027 |
| 207782_s_at | NM_007319 | 9437-9447 | 231070_at | BF431199 | 21028-21038 |
| 207814_at | NM_001926 | 9448-9458 | 231077_at | AI798832 | 21039-21049 |
| 207819_s_at | NM_000443 | 9459-9469 | 231148_at | AI806131 | 21050-21060 |
| 207827_x_at | L36675 | 9470-9480 | 231175_at | N48613 | 21061-21071 |
| 207847_s_at | NM_002456 | 9481-9491 | 231181_at | AI683621 | 21072-21082 |
| 207850_at | NM_002090 | 9492-9502 | 231187_at | AI206039 | 21083-21093 |
| 207858_s_at | NM_000298 | 9503-9513 | 231192_at | AW274018 | 21094-21104 |
| 207924_x_at | NM_013992 | 9514-9524 | 231240_at | AI038059 | 21105-21115 |
| 207935_s_at | NM_002274 | 9525-9535 | 231250_at | AI394574 | 21116-21126 |
| 207957_s_at | NM_002738 | 9536-9546 | 231259_s_at | BE467688 | 21127-21137 |
| 208078_s_at | NM_030751 | 9547-9557 | 231315_at | AI807728 | 21138-21148 |
| 208126_s_at | NM_000772 | 9558-9568 | 231331_at | AI085377 | 21149-21159 |
| 208131_s_at | NM_000961 | 9569-9579 | 231336_at | AI703256 | 21160-21170 |
| 208147_s_at | NM_030878 | 9580-9590 | 231341_at | BE670584 | 21171-21181 |
| 208153_s_at | NM_001447 | 9591-9601 | 231348_s_at | BF508869 | 21182-21192 |
| 208168_s_at | NM_003465 | 9602-9612 | 231398_at | AA777852 | 21193-21203 |
| 208170_s_at | NM_007028 | 9613-9623 | 231430_at | AW205640 | 21204-21214 |
| 208195_at | NM_003319 | 9624-9634 | 231439_at | AA922936 | 21215-21225 |
| 208198_x_at | NM_014512 | 9635-9645 | 231489_x_at | H12214 | 21226-21236 |
| 208209_s_at | NM_000716 | 9646-9656 | 231542_at | AL157421 | 21237-21247 |
| 208235_x_at | NM_021123 | 9657-9659 | 231579_s_at | BE968786 | 21248-21258 |
| 208250_s_at | NM_004406 | 9660-9670 | 231626_at | BE220053 | 21259-21269 |
| 208300_at | NM_002842 | 9671-9681 | 231646_at | AW473496 | 21270-21280 |
| 208305_at | NM_000926 | 9682-9692 | 231666_at | AA194168 | 21281-21291 |
| 208323_s_at | NM_004306 | 9693-9703 | 231678_s_at | AV651117 | 21292-21302 |
| 208367_x_at | NM_000776 | 9704-9711 | 231693_at | AV655991 | 21303-21313 |
| 208451_s_at | NM_000592 | 9712-9722 | 231711_at | BF592752 | 21314-21324 |
| 208471_at | NM_020995 | 9723-9733 | 231721_at | AF356518 | 21325-21335 |
| 208473_s_at | NM_016295 | 9734-9743 | 231728_at | NM_004058 | 21336-21346 |
| 208477_at | NM_004976 | 9744-9754 | 231729_s_at | NM_004058 | 21347-21357 |
| 208502_s_at | NM_002653 | 9755-9765 | 231736_x_at | NM_020300 | 21358-21362 |
| 208505_s_at | NM_000511 | 9766-9776 | 231771_at | AI694073 | 21363-21373 |
| 208539_x_at | NM_006945 | 9777-9787 | 231783_at | AI500293 | 21374-21384 |
| 208621_s_at | BF663141 | 9788-9798 | 231790_at | AA676742 | 21385-21395 |
| 208643_s_at | J04977 | 9799-9809 | 231814_at | AK025404 | 21396-21406 |
| 208650_s_at | BG327863 | 9810-9820 | 231856_at | AB033070 | 21407-21417 |
| 208651_x_at | M58664 | 9821-9831 | 231867_at | AB032953 | 21418-21428 |
| 208683_at | M23254 | 9832-9842 | 231898_x_at | AW026426 | 21429-21439 |
| 208694_at | U47077 | 9843-9853 | 231904_at | AU122448 | 21440-21450 |
| 208711_s_at | BC000076 | 9854-9864 | 231935_at | AL133109 | 21451-21461 |
| 208712_at | M73554 | 9865-9875 | 231941_s_at | AB037780 | 21462-21472 |
| 208724_s_at | BC000905 | 9876-9886 | 231993_at | AK026784 | 21473-21483 |
| 208726_s_at | BC000461 | 9887-9897 | 232010_at | AA129444 | 21484-21494 |
| 208731_at | AU158062 | 9898-9908 | 232056_at | AW470178 | 21495-21505 |
| 208750_s_at | AA580004 | 9909-9919 | 232082_x_at | BF575466 | 21506-21514 |
| 208760_at | AL031714 | 9920-9930 | 232116_at | AL137763 | 21515-21525 |
| 208775_at | D89729 | 9931-9941 | 232149_s_at | BF056507 | 21526-21536 |
| 208799_at | BC004146 | 320-330 | 232151_at | AL359055 | 21537-21547 |
| 208820_at | AL037339 | 9942-9952 | 232164_s_at | AL137725 | 21548-21558 |
| 208850_s_at | AL558479 | 9953-9963 | 232165_at | AL137725 | 21559-21569 |
| 208852_s_at | AI761759 | 9964-9974 | 232176_at | R70320 | 21570-21580 |
| 208853_s_at | L18887 | 9975-9985 | 232202_at | AK024927 | 21581-21591 |
| 208865_at | BG534245 | 9986-9996 | 232286_at | AA572675 | 21592-21602 |
| 208867_s_at | AF119911 | 9997-10007 | 232306_at | BG289314 | 21603-21613 |
| 208891_at | BC003143 | 11-Jan | 232318_s_at | AI680459 | 21614-21624 |
| 208892_s_at | BC003143 | 78-88 | 232321_at | AK026404 | 21625-21635 |
| 208992_s_at | BC000627 | 10008-10018 | 232352_at | AK001022 | 21636-21646 |
| 209008_x_at | U76549 | 10019-10029 | 232424_at | AI623202 | 21647-21657 |
| 209012_at | AV718192 | 10030-10040 | 232478_at | AU146021 | 21658-21668 |
| 209051_s_at | AF295773 | 10041-10051 | 232481_s_at | AL137517 | 21669-21679 |
| 209061_at | AI761748 | 10052-10062 | 232482_at | AF311306 | 21680-21690 |
| 209072_at | M13577 | 10063-10073 | 232523_at | AU144892 | 21691-21701 |
| 209074_s_at | AL050264 | 10074-10084 | 232531_at | AL137578 | 21702-21712 |
| 209114_at | AF133425 | 395-405 | 232546_at | AL136528 | 21713-21723 |
| 209122_at | BC005127 | 10085-10095 | 232578_at | BG547464 | 21724-21734 |
| 209125_at | J00269 | 10096-10106 | 232707_at | AK025181 | 21735-21745 |
| 209126_x_at | L42612 | 10107-10117 | 232737_s_at | AL157377 | 21746-21756 |
| 209135_at | AF289489 | 10118-10128 | 232765_x_at | AI985918 | 21757-21767 |
| 209154_at | AF234997 | 10129-10139 | 232955_at | AU144397 | 21768-21778 |
| 209156_s_at | AY029208 | 10140-10150 | 233064_at | AL365406 | 21779-21789 |
| 209160_at | AB018580 | 10151-10161 | 233364_s_at | AK021804 | 21790-21800 |
| 209167_at | AI419030 | 10162-10172 | 233446_at | AU145336 | 21801-21811 |
| 209168_at | AW148844 | 10173-10183 | 233499_at | AI366175 | 21812-21822 |
| 209169_at | N63576 | 10184-10194 | 233849_s_at | AK023014 | 21823-21833 |
| 209170_s_at | AF016004 | 10195-10205 | 233944_at | AU147118 | 21834-21844 |
| 209190_s_at | AF051782 | 10206-10216 | 233949_s_at | AI160292 | 21845-21855 |
| 209192_x_at | BC000166 | 10217-10227 | 233950_at | AK000873 | 21856-21866 |
| 209197_at | AA626780 | 10228-10238 | 233985_x_at | AV706485 | 21867-21877 |
| 209211_at | AF132818 | 10239-10249 | 234350_at | AF127125 | 21878-21888 |
| 209242_at | AL042588 | 10250-10260 | 234366_x_at | AF103591 | 21889-21899 |
| 209243_s_at | AF208967 | 10261-10271 | 234719_at | AK024889 | 21900-21910 |
| 209260_at | BC000329 | 10272-10282 | 235004_at | AI677701 | 21911-21921 |
| 209270_at | L25541 | 10283-10293 | 235075_at | AI813438 | 21922-21932 |
| 209283_at | AF007162 | 10294-10304 | 235077_at | BF956762 | 21933-21943 |
| 209291_at | AW157094 | 10305-10315 | 235118_at | AV724769 | 21944-21954 |
| 209292_at | AL022726 | 10316-10326 | 235127_at | AI699994 | 21955-21965 |
| 209301_at | M36532 | 10327-10337 | 235147_at | R56118 | 21966-21976 |
| 209309_at | D90427 | 10338-10348 | 235205_at | BF109660 | 21977-21987 |
| 209310_s_at | U25804 | 10349-10359 | 235251_at | AW292765 | 21988-21998 |
| 209341_s_at | AU153366 | 331-341 | 235272_at | AI814274 | 21999-22009 |
| 209343_at | BC002449 | 10360-10370 | 235342_at | AI808090 | 22010-22020 |
| 209349_at | U63139 | 10371-10381 | 235355_at | AL037998 | 22021-22031 |
| 209351_at | BC002690 | 10382-10392 | 235383_at | AA552060 | 22032-22042 |
| 209364_at | U66879 | 10393-10403 | 235400_at | AL560266 | 22043-22053 |
| 209368_at | AF233336 | 10404-10414 | 235417_at | BF689253 | 22054-22064 |
| 209436_at | AB018305 | 10415-10425 | 235445_at | BF965166 | 22065-22075 |
| 209441_at | AY009093 | 10426-10436 | 235460_at | AW149670 | 22076-22086 |
| 209442_x_at | AL136710 | 10437-10447 | 235465_at | N66614 | 22087-22097 |
| 209462_at | U48437 | 10448-10458 | 235503_at | BF589787 | 22098-22108 |
| 209466_x_at | M57399 | 10459-10469 | 235548_at | BG326592 | 22109-22119 |
| 209469_at | BF939489 | 10470-10480 | 235568_at | BF433657 | 22120-22130 |
| 209470_s_at | D49958 | 10481-10491 | 235591_at | R62424 | 22131-22141 |
| 209498_at | X16354 | 10492-10502 | 235639_at | AL137939 | 22142-22152 |
| 209514_s_at | BE502030 | 10503-10513 | 235651_at | AV741130 | 22153-22163 |
| 209515_s_at | U38654 | 10514-10524 | 235700_at | AI581344 | 22164-22174 |
| 209552_at | BC001060 | 10525-10535 | 235766_x_at | AA743462 | 22175-22182 |
| 209560_s_at | U15979 | 10536-10546 | 235774_at | AV699047 | 22183-22193 |
| 209569_x_at | NM_014392 | 10547-10557 | 235892_at | AI620881 | 22194-22204 |
| 209570_s_at | BC001745 | 10558-10568 | 235927_at | BE350122 | 22205-22215 |
| 209587_at | U70370 | 10569-10579 | 235976_at | AI680986 | 22216-22226 |
| 209602_s_at | AI796169 | 10580-10590 | 235977_at | BF433341 | 22227-22237 |
| 209603_at | AI796169 | 10591-10601 | 236017_at | AI199453 | 22238-22248 |
| 209604_s_at | BC003070 | 10602-10612 | 236028_at | BE466675 | 22249-22259 |
| 209616_s_at | S73751 | 10613-10623 | 236029_at | AI283093 | 22260-22270 |
| 209617_s_at | AF035302 | 10624-10634 | 236085_at | AI925136 | 22271-22281 |
| 209618_at | U96136 | 10635-10645 | 236119_s_at | AA456642 | 22282-22292 |
| 209644_x_at | U38945 | 10646-10656 | 236121_at | AI805082 | 22293-22303 |
| 209660_at | AF162690 | 10657-10667 | 236131_at | AW452631 | 22304-22314 |
| 209663_s_at | AF072132 | 10668-10678 | 236163_at | AW136983 | 22315-22325 |
| 209683_at | AA243659 | 10679-10689 | 236256_at | AW993690 | 22326-22336 |
| 209685_s_at | M13975 | 10690-10700 | 236264_at | BF511741 | 22337-22347 |
| 209686_at | BC001766 | 10701-10711 | 236361_at | BF432376 | 22348-22358 |
| 209692_at | U71207 | 10712-10722 | 236444_x_at | BE785577 | 22359-22369 |
| 209699_x_at | U05598 | 10723-10726 | 236523_at | BF435831 | 22370-22380 |
| 209706_at | AF247704 | 10727-10737 | 236534_at | W69365 | 22381-22391 |
| 209719_x_at | U19556 | 10738-10748 | 236538_at | BE219628 | 22392-22402 |
| 209720_s_at | BC005224 | 10749-10759 | 236761_at | AI939602 | 22403-22413 |
| 209742_s_at | AF020768 | 10760-10770 | 236773_at | AI635931 | 22414-22424 |
| 209752_at | AF172331 | 10771-10781 | 236860_at | BF968482 | 22425-22435 |
| 209757_s_at | BC002712 | 10782-10792 | 236926_at | AW074836 | 22436-22446 |
| 209771_x_at | AA761181 | 10793-10799 | 236972_at | AI351421 | 22447-22457 |
| 209772_s_at | X69397 | 10800-10810 | 237017_s_at | T73002 | 22458-22468 |
| 209790_s_at | BC000305 | 10811-10821 | 237030_at | AI659898 | 22469-22479 |
| 209794_at | AB007871 | 10822-10832 | 237058_x_at | AI802118 | 22480-22490 |
| 209799_at | AF100763 | 10833-10843 | 237077_at | AI821895 | 22491-22501 |
| 209800_at | AF061812 | 10844-10854 | 237086_at | AI693336 | 22502-22512 |
| 209810_at | J02761 | 10855-10865 | 237206_at | AI452798 | 22513-22523 |
| 209813_x_at | M16768 | 10866-10876 | 237328_at | AI927063 | 22524-22534 |
| 209815_at | BG054916 | 10877-10887 | 237339_at | AI668620 | 22535-22545 |
| 209824_s_at | AB000812 | 10888-10898 | 237350_at | AW027968 | 22546-22556 |
| 209827_s_at | NM_004513 | 10899-10909 | 237351_at | AI732190 | 22557-22567 |
| 209835_x_at | BC004372 | 10910-10916 | 237395_at | AV700083 | 22568-22578 |
| 209839_at | AL136712 | 10917-10927 | 237466_s_at | AW444502 | 22579-22589 |
| 209842_at | AI367319 | 10928-10938 | 237530_at | T77543 | 22590-22600 |
| 209843_s_at | BC002824 | 10939-10949 | 237732_at | AI432195 | 22601-22611 |
| 209844_at | U57052 | 10950-10960 | 237736_at | AI569844 | 22612-22622 |
| 209847_at | U07969 | 10961-10971 | 237810_at | AW003929 | 22623-22633 |
| 209848_s_at | U01874 | 10972-10982 | 238003_at | AI885128 | 22634-22644 |
| 209854_s_at | AA595465 | 10983-10993 | 238017_at | AI440266 | 22645-22655 |
| 209855_s_at | AF188747 | 10994-11004 | 238021_s_at | AA954994 | 22656-22666 |
| 209856_x_at | U31089 | 206-216 | 238047_at | AA405456 | 22667-22677 |
| 209863_s_at | AF091627 | 11005-11015 | 238143_at | AW001557 | 22678-22688 |
| 209871_s_at | AB014719 | 11016-11026 | 238165_at | AW665629 | 22689-22699 |
| 209875_s_at | M83248 | 89-99 | 238206_at | AI089319 | 22700-22710 |
| 209877_at | AF010126 | 11027-11037 | 238231_at | AV700263 | 22711-22721 |
| 209888_s_at | M20643 | 11038-11048 | 238452_at | AI393356 | 22722-22732 |
| 209902_at | U49844 | 11049-11059 | 238460_at | AI590662 | 22733-22743 |
| 209904_at | AF020769 | 11060-11070 | 238481_at | AW512787 | 22744-22754 |
| 209905_at | AI246769 | 11071-11081 | 238516_at | BF247383 | 22755-22765 |
| 209924_at | AB000221 | 11082-11092 | 238567_at | AW779536 | 22766-22776 |
| 209932_s_at | U90223 | 11093-11103 | 238575_at | AI094626 | 22777-22787 |
| 209937_at | BC001386 | 11104-11114 | 238584_at | W52934 | 22788-22798 |
| 209939_x_at | AF005775 | 342-350 | 238603_at | AI611973 | 22799-22809 |
| 209939_x_at | AF005775 | 182-183 | 238657_at | T86344 | 22810-22820 |
| 209950_s_at | BC004300 | 11115-11125 | 238689_at | BG426455 | 22821-22831 |
| 209975_at | AF182276 | 11126-11135 | 238698_at | AI659225 | 22832-22842 |
| 209976_s_at | AF182276 | 11136-11146 | 238699_s_at | AI659225 | 22843-22853 |
| 209977_at | M74220 | 11147-11157 | 238815_at | BF529195 | 22854-22864 |
| 209978_s_at | M74220 | 11158-11168 | 238850_at | AW015083 | 22865-22875 |
| 209990_s_at | AF056085 | 11169-11179 | 238878_at | AA496211 | 22876-22886 |
| 209991_x_at | AF069755 | 11180-11190 | 238956_at | AA502384 | 22887-22897 |
| 209995_s_at | BC003574 | 11191-11201 | 239006_at | AI758950 | 22898-22908 |
| 210002_at | D87811 | 11202-11212 | 239144_at | AA835648 | 22909-22919 |
| 210010_s_at | U25147 | 11213-11223 | 239202_at | BE552383 | 22920-22930 |
| 210013_at | BC005395 | 11224-11234 | 239230_at | AW079166 | 22931-22941 |
| 210020_x_at | M58026 | 11235-11245 | 239270_at | AL133721 | 22942-22952 |
| 210055_at | BE045816 | 11246-11256 | 239332_at | AW079559 | 22953-22963 |
| 210058_at | BC000433 | 11257-11267 | 239381_at | AU155415 | 22964-22974 |
| 210059_s_at | BC000433 | 11268-11278 | 239430_at | AA195677 | 22975-22985 |
| 210064_s_at | NM_006952 | 11279-11289 | 239537_at | AW589904 | 22986-22996 |
| 210065_s_at | AB002155 | 11290-11300 | 239595_at | AA569032 | 22997-23007 |
| 210066_s_at | D63412 | 11301-11311 | 239667_at | AW000967 | 23008-23018 |
| 210068_s_at | U63622 | 11312-11322 | 239707_at | BF510408 | 23019-23029 |
| 210084_x_at | AF206665 | 11323-11327 | 239767_at | W72323 | 23030-23040 |
| 210096_at | J02871 | 11328-11338 | 239805_at | AW136060 | 23041-23051 |
| 210105_s_at | M14333 | 11339-11349 | 239853_at | AI279514 | 23052-23062 |
| 210107_at | AF127036 | 11350-11360 | 239858_at | AI973051 | 23063-23073 |
| 210118_s_at | M15329 | 11361-11371 | 239860_at | AI311917 | 23074-23084 |
| 210133_at | D49372 | 11372-11382 | 239884_at | BE467579 | 23085-23095 |
| 210135_s_at | AF022654 | 11383-11393 | 239911_at | H49805 | 23096-23106 |
| 210138_at | AF074979 | 11394-11404 | 239990_at | AI821426 | 23107-23117 |
| 210143_at | AF196478 | 11405-11415 | 240033_at | BF447999 | 23118-23128 |
| 210159_s_at | AF230386 | 11416-11426 | 240045_at | AI694242 | 23129-23139 |
| 210162_s_at | U08015 | 11427-11437 | 240161_s_at | AI470220 | 23140-23150 |
| 210170_at | BC001017 | 11438-11448 | 240192_at | AI631850 | 23151-23161 |
| 210198_s_at | BC002665 | 11449-11459 | 240236_at | N50117 | 23162-23172 |
| 210213_s_at | AF022229 | 11460-11470 | 240242_at | BE222843 | 23173-23183 |
| 210215_at | AF067864 | 11471-11481 | 240253_at | BF508634 | 23184-23194 |
| 210216_x_at | AF084513 | 11482-11488 | 240275_at | AI936559 | 23195-23205 |
| 210239_at | U90304 | 11489-11499 | 240303_at | BG484769 | 23206-23216 |
| 210240_s_at | U20498 | 11500-11510 | 240331_at | AI820961 | 23217-23227 |
| 210246_s_at | AF087138 | 11511-11521 | 240433_x_at | H39185 | 23228-23238 |
| 210248_at | D83175 | 11522-11532 | 241137_at | AW338320 | 23239-23249 |
| 210263_at | AF029780 | 11533-11543 | 241291_at | AI922102 | 23250-23260 |
| 210289_at | AB013094 | 11544-11554 | 241314_at | AI732874 | 23261-23271 |
| 210297_s_at | U22178 | 11555-11565 | 241350_at | AL533913 | 23272-23282 |
| 210302_s_at | AF262032 | 11566-11576 | 241382_at | W22165 | 23283-23293 |
| 210326_at | D13368 | 11577-11587 | 241450_at | AI224952 | 23294-23304 |
| 210327_s_at | D13368 | 11588-11598 | 241813_at | BG252318 | 23305-23315 |
| 210328_at | AF101477 | 11599-11609 | 241914_s_at | AA804293 | 23316-23326 |
| 210337_s_at | U18197 | 11610-11620 | 241966_at | N67810 | 23327-23337 |
| 210339_s_at | BC005196 | 11621-11631 | 241987_x_at | BF029081 | 23338-23348 |
| 210342_s_at | M17755 | 11632-11642 | 242169_at | AA703201 | 23349-23359 |
| 210383_at | AF225985 | 11643-11653 | 242266_x_at | AW973803 | 23360-23368 |
| 210390_s_at | AF031587 | 11654-11664 | 242344_at | AA772920 | 23369-23379 |
| 210413_x_at | U19557 | 11665-11672 | 242406_at | AI870547 | 23380-23390 |
| 210432_s_at | AF225986 | 11673-11683 | 242468_at | AA767317 | 23391-23401 |
| 210446_at | M30601 | 11684-11694 | 242509_at | R71072 | 23402-23412 |
| 210448_s_at | U49396 | 11695-11705 | 242601_at | AA600175 | 23413-23423 |
| 210512_s_at | AF022375 | 100-110 | 242649_x_at | AI928428 | 23424-23434 |
| 210563_x_at | U97075 | 11706-11707 | 242660_at | AA846789 | 23435-23445 |
| 210564_x_at | AF009619 | 217-218 | 242733_at | AI457588 | 23446-23456 |
| 210587_at | BC005161 | 11708-11718 | 242785_at | BF663308 | 23457-23467 |
| 210621_s_at | M23612 | 11719-11729 | 242817_at | BE672390 | 23468-23478 |
| 210627_s_at | BC002804 | 11730-11740 | 242856_at | AI291804 | 23479-23489 |
| 210643_at | AF053712 | 11741-11751 | 242940_x_at | AA040332 | 23490-23500 |
| 210655_s_at | AF041336 | 11752-11762 | 243168_at | AI916532 | 23501-23511 |
| 210673_x_at | D50740 | 11763-11773 | 243231_at | N62096 | 23512-23522 |
| 210688_s_at | BC000185 | 11774-11784 | 243241_at | AW341473 | 23523-23533 |
| 210735_s_at | BC000278 | 11785-11795 | 243339_at | AI796076 | 23534-23544 |
| 210754_s_at | M79321 | 406-416 | 243346_at | BF109621 | 23545-23555 |
| 210756_s_at | AF308601 | 11796-11806 | 243409_at | AI005407 | 23556-23566 |
| 210794_s_at | AF119863 | 11807-11817 | 243483_at | AI272941 | 23567-23577 |
| 210798_x_at | AB008047 | 11818-11828 | 243489_at | BF514098 | 23578-23588 |
| 210808_s_at | AF166327 | 11829-11839 | 243669_s_at | AA502331 | 23589-23599 |
| 210809_s_at | D13665 | 11840-11850 | 243792_x_at | AI281371 | 23600-23610 |
| 210827_s_at | U73844 | 11851-11861 | 243818_at | T96555 | 23611-23621 |
| 210844_x_at | D14705 | 417-427 | 244023_at | AW467357 | 23622-23632 |
| 210888_s_at | AF116713 | 11862-11872 | 244044_at | AV691872 | 23633-23643 |
| 210896_s_at | AF306765 | 11873-11883 | 244056_at | AW293443 | 23644-23654 |
| 210906_x_at | U34846 | 11884-11892 | 244107_at | AW189097 | 23655-23665 |
| 210916_s_at | AF098641 | 11893-11901 | 244170_at | H05254 | 23666-23676 |
| 210929_s_at | AF130057 | 11902-11912 | 244403_at | R49501 | 23677-23687 |
| 210944_s_at | BC003169 | 11913-11923 | 244472_at | AW291482 | 23688-23698 |
| 210951_x_at | AF125393 | 11924-11928 | 244567_at | BG165613 | 23699-23709 |
| 210971_s_at | AB000815 | 11929-11939 | 244579_at | AI086336 | 23710-23720 |
| 210993_s_at | U54826 | 11940-11950 | 244692_at | AW025687 | 23721-23731 |
| 211002_s_at | AF230389 | 11951-11961 | 244723_at | BF510430 | 23732-23742 |
| 211024_s_at | BC006221 | 11962-11972 | 244739_at | AI051769 | 23743-23753 |
| 211029_x_at | BC006245 | 11973-11983 | 244780_at | AI800110 | 23754-23764 |
| 211062_s_at | BC006393 | 11984-11994 | 244839_at | AW975934 | 23765-23775 |
| 211063_s_at | BC006403 | 11995-12005 | 266_s_at | L33930 | 23776-23790 |
| 211071_s_at | BC006471 | 12006-12016 | 32128_at | Y13710 | 23791-23806 |
| 211105_s_at | U80918 | 12017-12027 | 32625_at | X15357 | 23807-23822 |
| 211144_x_at | M30894 | 12028-12029 | 33322_i_at | X57348 | 23823-23835 |
| 211151_x_at | AF185611 | 12030-12040 | 33323_r_at | X57348 | 23836-23850 |
| 211165_x_at | D31661 | 12041-12051 | 33767_at | X15306 | 23851-23864 |
| 211235_s_at | AF258450 | 12052-12062 | 34210_at | N90866 | 23865-23880 |
| 211298_s_at | AF116645 | 12063-12073 | 34471_at | M36769 | 23881-23895 |
| 211300_s_at | K03199 | 12074-12084 | 35617_at | U29725 | 23896-23911 |
| 211303_x_at | AF261715 | 12085-12089 | 35846_at | M24899 | 23912-23927 |
| 211357_s_at | BC005314 | 12090-12100 | 36711_at | AL021977 | 155-170 |
| 211361_s_at | AJ001696 | 12101-12111 | 37004_at | J02761 | 23928-23942 |
| 211430_s_at | M87789 | 12112-12122 | 37020_at | X56692 | 23943-23958 |
| 211464_x_at | U20537 | 12123-12132 | 37433_at | AF077954 | 23959-23974 |
| 211483_x_at | AF081924 | 12133-12143 | 37512_at | U89281 | 23975-23990 |
| 211536_x_at | AB009358 | 12144-12154 | 37892_at | J04177 | 23991-24004 |
| 211537_x_at | AF218074 | 12155-12158 | 37986_at | M60459 | 24005-24020 |
| 211546_x_at | L36674 | 12159-12162 | 38691_s_at | J03553 | 24021-24036 |
| 211548_s_at | J05594 | 12163-12168 | 39248_at | N74607 | 24037-24052 |
| 211549_s_at | U63296 | 12169-12179 | 39249_at | AB001325 | 24053-24068 |
| 211585_at | U58852 | 12180-12190 | 39966_at | AF059274 | 24069-24084 |
| 211597_s_at | AB059408 | 12191-12201 | 40560_at | U28049 | 461-476 |
| 211630_s_at | L42531 | 12202-12212 | 40562_at | AF011499 | 24085-24100 |
| 211653_x_at | M33376 | 12213-12218 | 40665_at | M83772 | 24101-24115 |
| 211657_at | M18728 | 12219-12229 | 41469_at | L10343 | 24116-24131 |
| 211671_s_at | U01351 | 219-224 | 564_at | M69013 | 24132-24141 |
| 211679_x_at | AF095784 | 12230-12235 | 60474_at | AA469071 | 24142-24156 |
| 211689_s_at | AF270487 | 12236-12246 | AFFX- | AFFX- | 24157-24176 |
| | | | HSAC07/X00351_5_at | HSAC07/X00351_5 | |
| 211711_s_at | BC005821 | 12247-12257 | AFFX- | AFFX- | 24177-24196 |
| | | | HUMISGF3A/M97935_5_at | HUMISGF3A/M97935_5 | |
| 211729_x_at | BC005902 | 12258-12260 | | | |
| 211735_x_at | BC005913 | 12261-12262 | | | |
| 211766_s_at | BC005989 | 12263-12273 | | | |
| 211792_s_at | U17074 | 12274-12284 | | | |

TABLE 3
200 genes used in conjunction with clinical variables to predict breast cancer
recurrence risk status. Cox regression p-value is testing the hypothesis if the expression
data is predictive of survival over and above the clinical variable covariates.

| Affymetrix Probe ID | Genbank Accession | Gene Symbol | p-value | SEQ ID NOS |
|---|---|---|---|---|
| 200005_at | NM_003753 | EIF3D | 0.000724 | 25788-25798 |
| 200684_s_at | AI819709 | UBE2L3 | 0.000414 | 25799-25809 |
| 200717_x_at | NM_000971 | RPL7 | 0.000941 | 25810-25820 |
| 200741_s_at | NM_001030 | RPS27 | 0.000398 | 25821-25831 |
| 200749_at | BF112006 | RAN | 0.000729 | 25832-25842 |
| 200756_x_at | U67280 | CALU | 5.56E−05 | 25843-25853 |
| 200772_x_at | BF686442 | PTMA | 0.00026 | 25854-25864 |
| 200847_s_at | NM_016127 | TMEM66 | 0.000108 | 25865-25875 |
| 200990_at | NM_005762 | TRIM28 | 0.000223 | 25876-25886 |
| 200997_at | NM_002896 | RBM4 | 3.60E−06 | 25887-25897 |
| 201115_at | NM_006230 | POLD2 | 0.000503 | 25898-25908 |
| 201200_at | NM_003851 | CREG1 | 5.54E−05 | 25909-25919 |
| 201277_s_at | NM_004499 | HNRNPAB | 0.00027 | 25920-25930 |
| 201291_s_at | AU159942 | TOP2A | 0.000616 | 25931-25941 |
| 201302_at | NM_001153 | ANXA4 | 1.17E−05 | 25942-25952 |
| 201383_s_at | AL044170 | NBR1 | 0.000565 | 25953-25963 |
| 201416_at | BG528420 | SOX4 | 0.000146 | 25964-25974 |
| 201459_at | NM_006666 | RUVBL2 | 2.80E−06 | 25975-25985 |
| 201494_at | NM_005040 | PRCP | 0.000421 | 25986-25996 |
| 201534_s_at | AF044221 | UBL3 | 0.000486 | 25997-26007 |
| 201571_s_at | AI656493 | DCTD | 3.00E−07 | 26008-26018 |
| 201726_at | BC003376 | ELAVL1 | 0.000735 | 26019-26029 |
| 201865_x_at | AI432196 | NR3C1 | 0.000346 | 171-181 |
| 202026_at | NM_003002 | SDHD | 7.00E−07 | 26030-26040 |
| 202120_x_at | NM_004069 | AP2S1 | 0.000206 | 26041-26051 |
| 202195_s_at | NM_016040 | TMED5 | 0.000708 | 26052-26062 |
| 202502_at | NM_000016 | ACADM | 0.000521 | 26063-26073 |
| 202545_at | NM_006254 | PRKCD | 0.000879 | 26074-26084 |
| 202567_at | NM_004175 | SNRPD3 | 0.00077 | 26085-26095 |
| 202667_s_at | NM_006979 | SLC39A7 | 0.000222 | 26096-26106 |
| 202835_at | BC001046 | TXNL4A | 0.000681 | 26107-26117 |
| 202838_at | NM_000147 | FUCA1 | 0.000398 | 26118-26128 |
| 202865_at | AI695173 | DNAJB12 | 1.29E−05 | 26129-26139 |
| 202871_at | NM_004295 | TRAF4 | 7.20E−05 | 26140-26150 |
| 202978_s_at | AW204564 | CREBZF | 0.000456 | 26151-26161 |
| 203123_s_at | AU154469 | SLC11A2 | 0.000395 | 26162-26172 |
| 203134_at | NM_007166 | PICALM | 0.000635 | 26173-26183 |
| 203266_s_at | NM_003010 | MAP2K4 | 0.00077 | 26184-26194 |
| 203276_at | NM_005573 | LMNB1 | 0.000657 | 26195-26205 |
| 203526_s_at | M74088 | APC | 0.000734 | 184-194 |
| 203606_at | NM_004553 | NDUFS6 | 8.79E−05 | 26206-26216 |
| 203638_s_at | NM_022969 | FGFR2 | 0.000394 | 26217-26227 |
| 203713_s_at | NM_004524 | LLGL2 | 0.000761 | 26228-26238 |
| 203725_at | NM_001924 | GADD45A | 0.000312 | 26239-26249 |
| 203744_at | NM_005342 | HMGB3 | 0.000108 | 26250-26260 |
| 203830_at | NM_022344 | C17orf75 | 1.46E−05 | 26261-26271 |
| 203975_s_at | BF000239 | CHAF1A | 0.000245 | 26272-26282 |
| 204033_at | NM_004237 | TRIP13 | 0.000126 | 26283-26293 |
| 204170_s_at | NM_001827 | CKS2 | 0.000831 | 25777-25787 |
| 204174_at | NM_001629 | ALOX5AP | 0.000501 | 26294-26304 |
| 204178_s_at | NM_006328 | RBM14 | 0.000547 | 26305-26315 |
| 204188_s_at | M57707 | RARG | 3.73E−05 | 26316-26326 |
| 204216_s_at | NM_024824 | ZC3H14 | 0.000647 | 26327-26337 |
| 204236_at | NM_002017 | FLI1 | 0.000182 | 26338-26348 |
| 204313_s_at | AA161486 | CREB1 | 0.000719 | 26349-26359 |
| 204402_at | NM_012265 | RHBDD3 | 0.00075 | 26360-26370 |
| 204767_s_at | BC000323 | FEN1 | 0.000261 | 26371-26381 |
| 204785_x_at | NM_000874 | IFNAR2 | 0.00087 | 26382-26392 |
| 204817_at | NM_012291 | ESPL1 | 0.000155 | 26393-26403 |
| 205083_at | NM_001159 | AOX1 | 3.90E−05 | 26404-26414 |
| 205097_at | AI025519 | SLC26A2 | 0.000632 | 26415-26425 |
| 205233_s_at | NM_000437 | PAFAH2 | 0.000648 | 26426-26436 |
| 205269_at | AI123251 | LCP2 | 0.000196 | 26437-26447 |
| 205417_s_at | NM_004393 | DAG1 | 0.000344 | 195-205 |
| 205436_s_at | NM_002105 | H2AFX | 0.000111 | 26448-26458 |
| 205538_at | NM_003389 | CORO2A | 0.000945 | 26459-26469 |
| 205542_at | NM_012449 | STEAP1 | 3.20E−06 | 26470-26480 |
| 205732_s_at | NM_006540 | NCOA2 | 0.00022 | 26481-26491 |
| 205746_s_at | U86755 | ADAM17 | 0.000743 | 26492-26502 |
| 205898_at | U20350 | CX3CR1 | 0.000518 | 26503-26513 |
| 206313_at | NM_002119 | HLA-DOA | 0.000314 | 26514-26524 |
| 206445_s_at | NM_001536 | PRMT1 | 7.30E−05 | 26525-26535 |
| 206748_s_at | NM_003971 | SPAG9 | 0.000159 | 26536-26546 |
| 206807_s_at | NM_017482 | ADD2 | 0.000267 | 26547-26557 |
| 207057_at | NM_004731 | SLC16A7 | 2.52E−05 | 26558-26568 |
| 207112_s_at | NM_002039 | GAB1 | 3.00E−07 | 26569-26579 |
| 207243_s_at | NM_001743 | | 4.75E−05 | 26580-26590 |
| 207292_s_at | NM_002749 | MAPK7 | 4.58E−05 | 26591-26601 |
| 207304_at | NM_003425 | ZNF45 | 6.25E−05 | 26602-26612 |
| 207319_s_at | NM_003718 | CDK13 | 0.000756 | 26613-26623 |
| 207387_s_at | NM_000167 | GK | 0.000692 | 26624-26634 |
| 207419_s_at | NM_002872 | RAC2 | 0.000137 | 26635-26645 |
| 208074_s_at | NM_021575 | AP2S1 | 0.000205 | 26646-26656 |
| 208228_s_at | M87771 | FGFR2 | 0.000197 | 26657-26667 |
| 208403_x_at | NM_002382 | MAX | 0.000162 | 26668-26678 |
| 208453_s_at | NM_006523 | XPNPEP1 | 0.000762 | 26679-26689 |
| 208503_s_at | NM_021167 | GATAD1 | 4.50E−06 | 26690-26700 |
| 208549_x_at | NM_016171 | PTMAP7 | 8.54E−05 | 26701-26710 |
| 208633_s_at | W61052 | MACF1 | 0.000436 | 26711-26721 |
| 208688_x_at | U78525 | EIF3B | 0.000813 | 26722-26732 |
| 208700_s_at | L12711 | TKT | 2.39E−05 | 26733-26743 |
| 208794_s_at | D26156 | SMARCA4 | 0.00027 | 26744-26754 |
| 208930_s_at | BG032366 | ILF3 | 0.000401 | 26755-26765 |
| 209006_s_at | AF247168 | C1orf63 | 0.000219 | 26766-26776 |
| 209059_s_at | AB002282 | EDF1 | 0.00072 | 26777-26787 |
| 209103_s_at | BC001049 | UFD1L | 0.000718 | 26788-26798 |
| 209302_at | U37689 | POLR2H | 0.000275 | 26799-26809 |
| 209311_at | D87461 | BCL2L2 | 0.000443 | 26810-26820 |
| 209431_s_at | AF254083 | PATZ1 | 9.70E−06 | 26821-26831 |
| 209456_s_at | AB033281 | FBXW11 | 0.000144 | 26832-26842 |
| 209508_x_at | AF005774 | CFLAR | 0.000165 | 26843-26853 |
| 209680_s_at | BC000712 | KIFC1 | 6.35E−05 | 26854-26864 |
| 209750_at | N32859 | NR1D2 | 0.000953 | 26865-26875 |
| 209754_s_at | AF113682 | TMPO | 0.000985 | 26876-26886 |
| 209856_x_at | U31089 | ABI2 | 0.000384 | 206-216 |
| 209939_x_at | AF005775 | CFLAR | 0.000316 | 182-183 |
| 209974_s_at | AF047473 | BUB3 | 0.000211 | 26887-26897 |
| 210282_at | AL136621 | ZMYM2 | 0.00017 | 26898-26908 |
| 210465_s_at | U71300 | SNAPC3 | 0.000233 | 26909-26919 |
| 210564_x_at | AF009619 | CFLAR | 0.000391 | 26920-26925 |
| 210564_x_at | AF009619 | CFLAR | 0.000391 | 217-218 |
| 210687_at | BC000185 | CPT1A | 0.000413 | 26926-26936 |
| 210838_s_at | L17075 | ACVRL1 | 0.000121 | 26937-26947 |
| 210872_x_at | BC001152 | GAS7 | 4.42E−05 | 26948-26958 |
| 210980_s_at | U47674 | ASAH1 | 0.000373 | 26959-26969 |
| 210981_s_at | AF040751 | GRK6 | 0.000279 | 26970-26980 |
| 211047_x_at | BC006337 | AP2S1 | 0.000333 | 26981-26986 |
| 211574_s_at | D84105 | CD46 | 0.000883 | 26987-26997 |
| 211671_s_at | U01351 | NR3C1 | 5.24E−05 | 219-224 |
| 211749_s_at | BC005941 | VAMP3 | 0.000123 | 26998-27008 |
| 211807_x_at | AF152521 | PCDHGB5 | 0.000467 | 27009-27019 |
| 211921_x_at | AF348514 | PTMA | 5.63E−05 | 27020-27025 |
| 211922_s_at | AY028632 | CAT | 0.000272 | 27026-27036 |
| 212008_at | N29889 | UBXN4 | 4.49E−05 | 27037-27047 |
| 212023_s_at | AU147044 | MKI67 | 6.68E−05 | 27048-27058 |
| 212084_at | AV759552 | TEX261 | 0.000814 | 27059-27069 |
| 212087_s_at | AL562733 | ERAL1 | 0.000101 | 27070-27080 |
| 212093_s_at | AI695017 | MTUS1 | 0.000164 | 27081-27091 |
| 212094_at | AL582836 | PEG10 | 8.26E−05 | 225-235 |
| 212181_s_at | AF191654 | NUDT4 | 9.48E−05 | 27092-27102 |
| 212196_at | AW242916 | IL6ST | 0.000294 | 27103-27113 |
| 212224_at | NM_000689 | ALDH1A1 | 7.20E−06 | 236-246 |
| 212241_at | AI632774 | GRINL1A | 0.000473 | 27114-27124 |
| 212324_s_at | BF111962 | VPS13D | 0.000526 | 27125-27135 |
| 212398_at | AI057093 | RDX | 0.000896 | 27136-27146 |
| 212526_at | AK002207 | SPG20 | 0.000331 | 27147-27157 |
| 212656_at | AF110399 | TSFM | 0.000656 | 27158-27168 |
| 212672_at | U82828 | ATM | 0.00075 | 27169-27179 |
| 212742_at | AL530462 | RNF115 | 6.12E−05 | 27180-27190 |
| 213007_at | W74442 | FANCI | 2.69E−05 | 27191-27201 |
| 213008_at | BG403615 | FANCI | 0.000113 | 27202-27212 |
| 213376_at | AI656706 | ZBTB1 | 0.000727 | 27213-27223 |
| 213441_x_at | AI745526 | SPDEF | 0.00043 | 27224-27232 |
| 213441_x_at | AI745526 | SPDEF | 0.00043 | 247-248 |
| 213507_s_at | BG249565 | KPNB1 | 0.00013 | 27233-27243 |
| 213614_x_at | BE786672 | EEF1A1 | 0.000334 | 27244-27254 |
| 213619_at | AV753392 | HNRNPH1 | 0.000102 | 27255-27265 |
| 213698_at | AI805560 | ZMYM6 | 6.90E−05 | 27266-27276 |
| 213702_x_at | AI934569 | ASAH1 | 0.00031 | 27277-27284 |
| 213720_s_at | AI831675 | SMARCA4 | 7.70E−06 | 27285-27295 |
| 214098_at | AB029030 | KIAA1107 | 0.000989 | 27296-27306 |
| 214196_s_at | AA602532 | TPP1 | 4.66E−05 | 27307-27317 |
| 214299_at | AI676092 | TOP3A | 0.000304 | 27318-27328 |
| 214513_s_at | M34356 | CREB1 | 0.000173 | 27329-27339 |
| 214670_at | AA653300 | ZKSCAN1 | 2.94E−05 | 27340-27350 |
| 214710_s_at | BE407516 | CCNB1 | 0.000727 | 27351-27361 |
| 214753_at | AW084068 | N4BP2L2 | 7.44E−05 | 27362-27372 |
| 214843_s_at | AK022864 | USP33 | 0.000271 | 27373-27383 |
| 214845_s_at | AF257659 | CALU | 3.61E−05 | 27384-27390 |
| 214995_s_at | BF508948 | | 6.20E−05 | 27391-27401 |
| 215533_s_at | AF091093 | UBE4B | 2.44E−05 | 27402-27412 |
| 215784_at | AA309511 | CD1E | 9.90E−06 | 27413-27423 |
| 215832_x_at | AV722190 | PICALM | 2.44E−05 | 27424-27434 |
| 217014_s_at | AC004522 | AZGP1 | 8.57E−05 | 249-259 |
| 217370_x_at | S75762 | NR1H3 | 0.000774 | 27435-27445 |
| 217591_at | BF725121 | SKIL | 0.00024 | 27446-27456 |
| 217732_s_at | AF092128 | ITM2B | 0.000378 | 27457-27467 |
| 217806_s_at | NM_015584 | POLDIP2 | 0.000478 | 27468-27478 |
| 218009_s_at | NM_003981 | PRC1 | 5.30E−06 | 27479-27489 |
| 218039_at | NM_016359 | NUSAP1 | 0.000324 | 27490-27500 |
| 218194_at | NM_015523 | REXO2 | 0.000854 | 27501-27511 |
| 218318_s_at | NM_016231 | NLK | 0.000535 | 27512-27522 |
| 218592_s_at | NM_017829 | CECR5 | 6.83E−05 | 27523-27533 |
| 218614_at | NM_018169 | C12orf35 | 0.000769 | 27534-27544 |
| 218659_at | NM_018263 | ASXL2 | 1.00E−07 | 27545-27555 |
| 218755_at | NM_005733 | KIF20A | 0.000986 | 27556-27566 |
| 218924_s_at | NM_004388 | CTBS | 0.000386 | 27567-27577 |
| 219074_at | NM_018241 | TMEM184C | 0.000193 | 27578-27588 |
| 219223_at | NM_017586 | C9orf7 | 0.000695 | 27589-27599 |
| 219288_at | NM_020685 | C3orf14 | 0.000751 | 260-270 |
| 219328_at | NM_022779 | DDX31 | 0.000803 | 27600-27610 |
| 219582_at | NM_024576 | OGFRL1 | 0.000625 | 27611-27621 |
| 219679_s_at | NM_018604 | WAC | 0.000399 | 27622-27632 |
| 219777_at | NM_024711 | GIMAP6 | 0.000612 | 27633-27643 |
| 219924_s_at | NM_007167 | ZMYM6 | 0.000467 | 27644-27654 |
| 219961_s_at | NM_018474 | PLK1S1 | 0.000472 | 27655-27665 |
| 219969_at | NM_018360 | TXLNG | 0.000643 | 27666-27676 |
| 220324_at | NM_024882 | C6orf155 | 2.11E−05 | 27677-27687 |
| 220338_at | NM_018037 | RALGPS2 | 0.000907 | 27688-27698 |
| 220368_s_at | NM_017936 | SMEK1 | 0.000534 | 27699-27709 |
| 220526_s_at | NM_017971 | MRPL20 | 7.92E−05 | 27710-27720 |
| 220985_s_at | NM_030954 | RNF170 | 1.10E−06 | 27721-27731 |
| 221242_at | NM_025051 | | 0.000182 | 27732-27742 |
| 221434_s_at | NM_031210 | C14orf156 | 0.000406 | 27743-27753 |
| 221509_at | AB014731 | DENR | 6.91E−05 | 27754-27764 |
| 221523_s_at | AL138717 | RRAGD | 0.000675 | 27765-27775 |
| 221643_s_at | AF016005 | RERE | 0.000235 | 27776-27786 |
| 221976_s_at | AW207448 | HDGFRP3 | 0.000196 | 27787-27797 |
| 222077_s_at | AU153848 | RACGAP1 | 0.000115 | 27798-27808 |
| 222314_x_at | AW970881 | EGOT | 0.000807 | 27809-27819 |
| 34031_i_at | U90269 | KRIT1 | 4.16E−05 | 27820-27832 |
| 40020_at | AB011536 | CELSR3 | 0.000742 | 27833-27848 |
| 64486_at | AI341234 | CORO1B | 0.000941 | 27849-27864 |

TABLE 6
163 genes used in conjunction with clinical variables to predict colon cancer
recurrence risk status. Cox regression p-value is testing the hypothesis if the expression
data is predictive of survival over and above the clinical variable covariates.

| Affymetrix probe ID | Genbank Accession | Gene Symbol | p-value | SEQ ID NOS |
|---|---|---|---|---|
| 1553954_at | BU682208 | ALG14 | 1.89E−03 | 24197-24207 |
| 1554078_s_at | BC032100 | DNAJA3 | 8.51E−04 | 24208-24218 |
| 1555832_s_at | BU683415 | KLF6 | 5.44E−04 | 24219-24229 |
| 1555950_a_at | CA448665 | CD55 | 2.32E−05 | 24230-24240 |
| 1560089_at | AL833509 | LOC100289019 | 1.72E−03 | 24241-24251 |
| 1560587_s_at | AI718223 | PRDX5 | 8.98E−04 | 24252-24262 |
| 1563796_s_at | AK095998 | EARS2 | 1.51E−04 | 24263-24273 |
| 200006_at | NM_007262 | PARK7 | 1.88E−03 | 24274-24284 |
| 200632_s_at | NM_006096 | NDRG1 | 4.74E−05 | 24285-24295 |
| 200665_s_at | NM_003118 | SPARC | 9.49E−04 | 24296-24306 |
| 200827_at | NM_000302 | PLOD1 | 1.79E−04 | 24307-24317 |
| 200838_at | NM_001908 | CTSB | 1.77E−03 | 24318-24328 |
| 200839_s_at | NM_001908 | CTSB | 1.95E−03 | 24329-24339 |
| 200931_s_at | NM_014000 | VCL | 5.40E−04 | 12-22 |
| 200983_x_at | BF983379 | CD59 | 1.20E−03 | 24340-24350 |
| 201012_at | NM_000700 | ANXA1 | 2.47E−04 | 24351-24361 |
| 201141_at | NM_002510 | GPNMB | 1.82E−03 | 24362-24372 |
| 201170_s_at | NM_003670 | BHLHE40 | 5.20E−06 | 24373-24383 |
| 201185_at | NM_002775 | HTRA1 | 5.72E−04 | 24384-24394 |
| 201261_x_at | BC002416 | BGN | 1.47E−04 | 24395-24405 |
| 201289_at | NM_001554 | CYR61 | 7.00E−04 | 24406-24416 |
| 201323_at | NM_006824 | EBNA1BP2 | 1.65E−03 | 24417-24427 |
| 201422_at | NM_006332 | IFI30 | 6.79E−04 | 24428-24438 |
| 201426_s_at | AI922599 | VIM | 1.67E−03 | 24439-24449 |
| 201578_at | NM_005397 | PODXL | 1.27E−03 | 24450-24460 |
| 201590_x_at | NM_004039 | ANXA2 | 5.77E−04 | 24461-24471 |
| 201666_at | NM_003254 | TIMP1 | 3.55E−04 | 23-33 |
| 201925_s_at | NM_000574 | CD55 | 2.78E−05 | 24472-24482 |
| 201926_s_at | BC001288 | CD55 | 2.68E−05 | 24483-24491 |
| 201939_at | NM_006622 | PLK2 | 1.45E−03 | 24492-24502 |
| 201951_at | BF242905 | ALCAM | 2.13E−04 | 24503-24513 |
| 202068_s_at | NM_000527 | LDLR | 1.02E−04 | 34-44 |
| 202237_at | NM_006169 | NNMT | 1.80E−03 | 24514-24524 |
| 202238_s_at | NM_006169 | NNMT | 1.80E−03 | 24525-24535 |
| 202419_at | NM_002035 | KDSR | 4.95E−04 | 24536-24546 |
| 202457_s_at | AA911231 | PPP3CA | 1.90E−03 | 45-55 |
| 202478_at | NM_021643 | TRIB2 | 7.90E−04 | 24547-24557 |
| 202839_s_at | NM_004146 | NDUFB7 | 6.09E−04 | 24558-24568 |
| 202887_s_at | NM_019058 | DDIT4 | 8.94E−05 | 24569-24579 |
| 202904_s_at | NM_012322 | LSM5 | 1.97E−03 | 24580-24590 |
| 202939_at | NM_005857 | ZMPSTE24 | 1.79E−03 | 24591-24601 |
| 202949_s_at | NM_001450 | FHL2 | 2.82E−04 | 56-66 |
| 203072_at | NM_004998 | MYO1E | 8.77E−04 | 24602-24612 |
| 203083_at | NM_003247 | THBS2 | 1.23E−04 | 24613-24623 |
| 203382_s_at | NM_000041 | APOE | 4.30E−04 | 24624-24634 |
| 203476_at | NM_006670 | TPBG | 1.50E−04 | 24635-24645 |
| 203895_at | AL535113 | PLCB4 | 6.44E−04 | 67-77 |
| 204264_at | NM_000098 | CPT2 | 9.97E−04 | 24646-24656 |
| 204472_at | NM_005261 | GEM | 4.33E−04 | 24657-24667 |
| 204620_s_at | NM_004385 | VCAN | 5.28E−04 | 24668-24678 |
| 204679_at | NM_002245 | KCNK1 | 1.58E−03 | 24679-24689 |
| 205677_s_at | NM_005887 | DLEU1 | 7.15E−04 | 24690-24700 |
| 205963_s_at | NM_005147 | DNAJA3 | 4.48E−04 | 24701-24709 |
| 207543_s_at | NM_000917 | P4HA1 | 1.62E−05 | 24710-24720 |
| 207574_s_at | NM_015675 | GADD45B | 4.19E−04 | 24721-24731 |
| 208891_at | BC003143 | DUSP6 | 5.66E−04 | 1-11 |
| 208892_s_at | BC003143 | DUSP6 | 1.70E−03 | 78-88 |
| 208893_s_at | BC005047 | DUSP6 | 1.45E−03 | 24732-24742 |
| 208918_s_at | AI334128 | NADK | 7.87E−04 | 24743-24753 |
| 208961_s_at | AB017493 | KLF6 | 1.75E−03 | 24754-24764 |
| 209043_at | AF033026 | PAPSS1 | 4.70E−04 | 24765-24775 |
| 209101_at | M92934 | CTGF | 8.53E−05 | 24776-24786 |
| 209184_s_at | BF700086 | IRS2 | 8.39E−04 | 24787-24797 |
| 209185_s_at | AF073310 | IRS2 | 5.24E−04 | 24798-24808 |
| 209193_at | M24779 | PIM1 | 7.01E−04 | 24809-24819 |
| 209345_s_at | AL561930 | PI4K2A | 1.53E−03 | 24820-24830 |
| 209386_at | AI346835 | TM4SF1 | 2.74E−05 | 24831-24841 |
| 209387_s_at | M90657 | TM4SF1 | 1.10E−03 | 24842-24852 |
| 209457_at | U16996 | DUSP5 | 1.71E−03 | 24853-24863 |
| 209545_s_at | AF064824 | RIPK2 | 1.57E−03 | 24864-24874 |
| 209624_s_at | AB050049 | MCCC2 | 1.21E−03 | 24875-24885 |
| 209711_at | N80922 | SLC35D1 | 1.70E−04 | 24886-24896 |
| 209875_s_at | M83248 | SPP1 | 1.88E−04 | 89-99 |
| 210095_s_at | M31159 | IGFBP3 | 6.96E−04 | 24897-24907 |
| 210275_s_at | AF062347 | ZFAND5 | 6.18E−04 | 24908-24918 |
| 210427_x_at | BC001388 | ANXA2 | 1.57E−03 | 24919-24919 |
| 210495_x_at | AF130095 | FN1 | 4.08E−05 | 24920-24930 |
| 210512_s_at | AF022375 | VEGFA | 3.54E−05 | 100-110 |
| 210517_s_at | AB003476 | AKAP12 | 1.99E−04 | 24931-24941 |
| 210592_s_at | M55580 | SAT1 | 7.13E−04 | 24942-24952 |
| 210652_s_at | BC004399 | TTC39A | 1.64E−03 | 24953-24963 |
| 210845_s_at | U08839 | PLAUR | 1.20E−04 | 24964-24974 |
| 211074_at | AF000381 | FOLR1 | 1.81E−05 | 24975-24985 |
| 211719_x_at | BC005858 | FN1 | 1.91E−04 | 24986-24988 |
| 211924_s_at | AY029180 | PLAUR | 1.10E−03 | 24989-24999 |
| 211928_at | AB002323 | DYNC1H1 | 1.01E−03 | 25000-25010 |
| 211988_at | BG289800 | SMARCE1 | 1.51E−03 | 25011-25021 |
| 212013_at | D86983 | PXDN | 2.74E−04 | 25022-25032 |
| 212143_s_at | BF340228 | IGFBP3 | 1.82E−03 | 25033-25043 |
| 212171_x_at | H95344 | VEGFA | 8.33E−04 | 25044-25054 |
| 212463_at | BE379006 | CD59 | 1.02E−03 | 25055-25065 |
| 212464_s_at | X02761 | FN1 | 3.36E−05 | 25066-25072 |
| 212501_at | AL564683 | CEBPB | 8.65E−04 | 25073-25083 |
| 212632_at | N32035 | STX7 | 8.03E−04 | 25084-25094 |
| 212884_x_at | AI358867 | APOE | 2.19E−04 | 25095-25104 |
| 213274_s_at | AA020826 | CTSB | 1.77E−03 | 25105-25115 |
| 213503_x_at | BE908217 | ANXA2 | 7.82E−04 | 25116-25116 |
| 213905_x_at | AA845258 | BGN | 2.69E−04 | 25117-25120 |
| 214581_x_at | BE568134 | TNFRSF21 | 1.24E−03 | 25121-25131 |
| 214620_x_at | BF038548 | PAM | 6.78E−04 | 25132-25142 |
| 214866_at | X74039 | PLAUR | 4.11E−04 | 25143-25153 |
| 215033_at | AI189753 | TM4SF1 | 2.05E−05 | 25154-25164 |
| 215034_s_at | AI189753 | TM4SF1 | 2.05E−05 | 25165-25175 |
| 215792_s_at | AL109978 | DNAJC11 | 1.81E−03 | 25176-25186 |
| 216392_s_at | AK021846 | SEC23IP | 5.52E−04 | 25187-25197 |
| 216442_x_at | AK026737 | FN1 | 2.37E−05 | 25198-25198 |
| 217762_s_at | BE789881 | RAB31 | 1.32E−03 | 25199-25209 |
| 217773_s_at | NM_002489 | NDUFA4 | 1.86E−05 | 25210-25220 |
| 217996_at | AA576961 | PHLDA1 | 4.74E−04 | 25221-25231 |
| 218213_s_at | NM_014206 | C11orf10 | 1.63E−03 | 25232-25242 |
| 218698_at | NM_015957 | APIP | 1.77E−03 | 25243-25253 |
| 218856_at | NM_016629 | TNFRSF21 | 8.15E−04 | 25254-25264 |
| 218902_at | NM_017617 | NOTCH1 | 5.32E−04 | 25265-25275 |
| 219038_at | NM_024657 | MORC4 | 6.74E−04 | 25276-25286 |
| 219206_x_at | NM_016056 | TMBIM4 | 1.51E−03 | 25287-25297 |
| 219539_at | NM_024775 | GEMIN6 | 1.92E−03 | 25298-25308 |
| 221419_s_at | NM_013307 | | 5.04E−04 | 25309-25319 |
| 221479_s_at | AF060922 | BNIP3L | 2.06E−04 | 25320-25330 |
| 221563_at | N36770 | DUSP10 | 7.92E−04 | 25331-25341 |
| 221648_s_at | AK025651 | | 1.07E−03 | 25342-25352 |
| 221656_s_at | BC003073 | ARHGEF10L | 1.20E−03 | 25353-25363 |
| 221730_at | NM_000393 | COL5A2 | 1.86E−03 | 25364-25374 |
| 221731_x_at | BF218922 | VCAN | 1.88E−03 | 25375-25382 |
| 221745_at | BE538424 | DCAF7 | 1.75E−03 | 25383-25393 |
| 222421_at | BF435617 | UBE2H | 1.66E−03 | 25394-25404 |
| 222994_at | AF197952 | PRDX5 | 1.02E−03 | 25405-25414 |
| 223003_at | AF061732 | C19orf43 | 1.67E−03 | 25415-25425 |
| 223122_s_at | AF311912 | SFRP2 | 3.15E−05 | 111-121 |
| 223163_s_at | BC000190 | ZC3HC1 | 1.94E−03 | 25426-25436 |
| 223312_at | BC005069 | C2orf7 | 4.95E−05 | 25437-25447 |
| 223454_at | AF275260 | CXCL16 | 8.98E−04 | 25448-25458 |
| 223455_at | BG493862 | TCHP | 3.80E−04 | 25459-25469 |
| 224602_at | BF244081 | C4orf3 | 1.61E−03 | 25470-25480 |
| 224606_at | BG250721 | KLF6 | 1.91E−04 | 25481-25491 |
| 224657_at | AL034417 | ERRFI1 | 1.29E−03 | 25492-25502 |
| 224777_s_at | BG386322 | PAFAH1B2 | 1.81E−03 | 25503-25513 |
| 224806_at | BE563152 | TRIM25 | 1.54E−04 | 25514-25524 |
| 224890_s_at | BE727643 | C7orf59 | 1.32E−03 | 25525-25535 |
| 224911_s_at | AA722799 | DCBLD2 | 1.74E−03 | 25536-25546 |
| 225010_at | AK024913 | CCDC6 | 1.49E−03 | 25547-25557 |
| 225011_at | AK026351 | PRKAR2A | 4.84E−04 | 25558-25568 |
| 225337_at | AI346910 | ABHD2 | 1.55E−03 | 25569-25579 |
| 225494_at | BG478726 | DYNLL2 | 1.17E−04 | 25580-25590 |
| 225670_at | AI384017 | FAM173B | 8.18E−04 | 25591-25601 |
| 225750_at | BE966748 | | 6.24E−04 | 25602-25612 |
| 226041_at | BF382393 | NAPEPLD | 1.87E−03 | 25613-25623 |
| 226594_at | AA528157 | | 1.12E−03 | 25624-25634 |
| 226648_at | AI769745 | HIF1AN | 1.93E−03 | 25635-25645 |
| 226727_at | BG171264 | CISD3 | 3.53E−04 | 25646-25656 |
| 226987_at | W68720 | RBM15B | 1.48E−03 | 25657-25667 |
| 227143_s_at | AA706658 | BID | 1.30E−03 | 122-132 |
| 227338_at | H99038 | | 7.99E−04 | 25668-25678 |
| 227735_s_at | AA553959 | | 9.29E−04 | 133-143 |
| 227736_at | AA553959 | C10orf99 | 2.00E−03 | 144-154 |
| 227961_at | AA130998 | CTSB | 1.94E−03 | 25679-25689 |
| 229676_at | AA400998 | MTPAP | 2.41E−05 | 25690-25700 |
| 231576_at | AA829940 | | 9.56E−05 | 25701-25711 |
| 234983_at | BE893995 | | 1.10E−04 | 25712-25722 |
| 241355_at | BF528433 | HR | 1.20E−03 | 25723-25733 |
| 242648_at | BE858995 | KLHL8 | 1.59E−03 | 25734-25744 |
| 35156_at | AL050297 | R3HCC1 | 1.37E−03 | 25745-25760 |
| 36711_at | AL021977 | MAFF | 1.77E−03 | 155-170 |
| 58780_s_at | R42449 | ARHGEF40 | 7.64E−04 | 25761-25776 |

TABLE 8
Annotated 160-gene lung cancer prognostic gene set. Cox regression
p-values indicate the significance of each gene's association with
survival over and above the covariates of age, stage, gender,
grade and smoking history.

| Affymetrix | Genbank | | | SEQ |
|---|---|---|---|---|
| Probe ID | Accession no | Gene Symbol | p-value | ID NOS |
| 1729_at | L41690 | TRADD | 0.000818 | 271-286 |
| 200046_at | NM_001344 | DAD1 | 0.000047 | 27881-27891 |
| 200063_s_at | BC002398 | NPM1 | 0.000594 | 27892-27902 |
| 200619_at | NM_006842 | SF3B2 | 5E−07 | 27903-27913 |
| 200621_at | NM_004078 | CSRP1 | 0.000125 | 27914-27924 |
| 200718_s_at | AA927664 | SKP1 | 6.91E−05 | 27925-27935 |
| 200725_x_at | NM_006013 | RPL10 | 0.000694 | 27936-27946 |
| 200732_s_at | AL578310 | PTP4A1 | 0.000105 | 27947-27957 |
| 200738_s_at | NM_000291 | PGK1 | 9.19E−05 | 27958-27968 |
| 200786_at | NM_002799 | PSMB7 | 0.000515 | 27969-27979 |
| 200886_s_at | NM_002629 | PGAM1 | 0.000519 | 27980-27990 |
| 201010_s_at | NM_006472 | TXNIP | 0.000907 | 27991-28001 |
| 201152_s_at | N31913 | MBNL1 | 0.000392 | 28002-28012 |
| 201174_s_at | NM_018975 | TERF2IP | 1.85E−05 | 28013-28023 |
| 201175_at | NM_015959 | TMX2 | 0.000853 | 28024-28034 |
| 201202_at | NM_002592 | PCNA | 0.00022 | 287-297 |
| 201256_at | NM_004718 | COX7A2L | 1.72E−05 | 28035-28045 |
| 201288_at | NM_001175 | ARHGDIB | 6.5E−06 | 298-308 |
| 201303_at | NM_014740 | EIF4A3 | 3E−07 | 28046-28056 |
| 201320_at | BF663402 | SMARCC2 | 0.000415 | 28057-28067 |
| 201457_x_at | AF081496 | BUB3 | 0.000242 | 28068-28078 |
| 201460_at | AI141802 | MAPKAPK2 | 6.62E−05 | 28079-28089 |
| 201499_s_at | NM_003470 | USP7 | 0.000808 | 28090-28100 |
| 201535_at | NM_007106 | UBL3 | 0.000773 | 28101-28111 |
| 201544_x_at | BF675004 | PABPN1 | 0.000866 | 28112-28122 |
| 201586_s_at | NM_005066 | SFPQ | 0.000605 | 28123-28133 |
| 201597_at | NM_001865 | COX7A2 | 0.000144 | 28134-28144 |
| 201655_s_at | M85289 | HSPG2 | 0.000187 | 28145-28155 |
| 201865_x_at | AI432196 | NR3C1 | 0.000873 | 171-181 |
| 201897_s_at | NM_001826 | CKS1B | 1.92E−05 | 28156-28166 |
| 201919_at | AL049246 | SLC25A36 | 0.000142 | 28167-28177 |
| 201930_at | NM_005915 | MCM6 | 7.95E−05 | 28178-28188 |
| 201960_s_at | NM_015057 | MYCBP2 | 0.000508 | 28189-28199 |
| 201997_s_at | NM_015001 | SPEN | 0.000494 | 28200-28210 |
| 202107_s_at | NM_004526 | MCM2 | 0.000123 | 28211-28221 |
| 202239_at | NM_006437 | PARP4 | 0.000455 | 28222-28232 |
| 202503_s_at | NM_014736 | KIAA0101 | 1.1E−06 | 28233-28243 |
| 202553_s_at | NM_015484 | SYF2 | 0.000338 | 28244-28254 |
| 202555_s_at | NM_005965 | MYLK | 0.000623 | 309-319 |
| 202697_at | NM_007006 | NUDT21 | 0.000777 | 28255-28265 |
| 202737_s_at | NM_012321 | LSM4 | 0.000193 | 28266-28276 |
| 202822_at | BF221852 | LPP | 4.3E−06 | 28277-28287 |
| 202954_at | NM_007019 | UBE2C | 0.000667 | 28288-28298 |
| 202957_at | NM_005335 | HCLS1 | 0.000338 | 28299-28309 |
| 203005_at | NM_002342 | LTBR | 0.000984 | 28310-28320 |
| 203037_s_at | NM_014751 | MTSS1 | 0.000506 | 28321-28331 |
| 203055_s_at | NM_004706 | ARHGEF1 | 0.000578 | 28332-28342 |
| 203057_s_at | AV724783 | PRDM2 | 0.000516 | 28343-28353 |
| 203147_s_at | BE962483 | TRIM14 | 0.000277 | 28354-28364 |
| 203232_s_at | NM_000332 | ATXN1 | 0.000559 | 28365-28375 |
| 203314_at | NM_012227 | GTPBP6 | 0.000551 | 28376-28386 |
| 203385_at | NM_001345 | DGKA | 0.000277 | 28387-28397 |
| 203536_s_at | NM_004804 | CIAO1 | 0.000121 | 28398-28408 |
| 203746_s_at | NM_005333 | HCCS | 0.00021 | 28409-28419 |
| 203804_s_at | NM_006107 | LUC7L3 | 0.00068 | 28420-28430 |
| 203818_s_at | NM_006802 | SF3A3 | 0.00015 | 28431-28441 |
| 203846_at | BC003154 | TRIM32 | 0.000994 | 28442-28452 |
| 204020_at | BF739943 | PURA | 0.000236 | 28453-28463 |
| 204135_at | NM_014890 | FILIP1L | 0.000428 | 28464-28474 |
| 204170_s_at | NM_001827 | CKS2 | 3.03E−05 | 25777-25787 |
| 204206_at | NM_020310 | MNT | 0.000398 | 28475-28485 |
| 204538_x_at | NM_006985 | NPIP | 0.000736 | 28486-28496 |
| 204978_at | NM_007056 | SFRS16 | 0.000185 | 28497-28507 |
| 205202_at | NM_005389 | PCMT1 | 0.000731 | 28508-28518 |
| 205308_at | NM_016010 | FAM164A | 0.000636 | 28519-28529 |
| 207081_s_at | NM_002650 | PI4KA | 0.000584 | 28530-28540 |
| 207186_s_at | NM_004459 | BPTF | 0.000553 | 28541-28551 |
| 207365_x_at | NM_014709 | USP34 | 0.000814 | 28552-28562 |
| 208174_x_at | NM_005089 | ZRSR2 | 0.000515 | 28563-28573 |
| 208610_s_at | AI655799 | SRRM2 | 0.000352 | 28574-28584 |
| 208616_s_at | U48297 | PTP4A2 | 0.000957 | 28585-28595 |
| 208634_s_at | AB029290 | MACF1 | 0.000645 | 28596-28606 |
| 208727_s_at | BC002711 | CDC42 | 0.00045 | 28607-28617 |
| 208763_s_at | AL110191 | TSC22D3 | 0.000621 | 28618-28628 |
| 208798_x_at | AF204231 | GOLGA8A | 0.000574 | 28629-28639 |
| 208799_at | BC004146 | PSMB5 | 2.58E−05 | 320-330 |
| 208872_s_at | AA814140 | REEP5 | 0.000604 | 28640-28650 |
| 208891_at | BC003143 | DUSP6 | 2.52E−05 | 1-11 |
| 208943_s_at | U93239 | SEC62 | 0.000197 | 28651-28661 |
| 208994_s_at | AI638762 | PPIG | 0.000348 | 28662-28672 |
| 209007_s_at | AF267856 | C1orf63 | 0.000309 | 28673-28683 |
| 209045_at | AF195530 | XPNPEP1 | 0.000998 | 28684-28694 |
| 209050_s_at | AI421559 | RALGDS | 0.00021 | 28695-28705 |
| 209161_at | AI184802 | PRPF4 | 0.000622 | 28706-28716 |
| 209199_s_at | N22468 | MEF2C | 0.000613 | 28717-28727 |
| 209240_at | AF070560 | OGT | 0.00042 | 28728-28738 |
| 209263_x_at | BC000389 | TSPAN4 | 6.27E−05 | 28739-28749 |
| 209341_s_at | AU153366 | IKBKB | 0.000821 | 331-341 |
| 209365_s_at | U65932 | ECM1 | 3.27E−05 | 28750-28760 |
| 209448_at | BC002439 | HTATIP2 | 0.000387 | 28761-28771 |
| 209467_s_at | BC002755 | MKNK1 | 0.000533 | 28772-28782 |
| 209473_at | AV717590 | ENTPD1 | 0.00017 | 28783-28793 |
| 209609_s_at | BC004517 | MRPL9 | 1.42E−05 | 28794-28804 |
| 209939_x_at | AF005775 | CFLAR | 0.000316 | 342-350 |
| 209939_x_at | AF005775 | CFLAR | 0.000316 | 182-183 |
| 210266_s_at | AF220137 | TRIM33 | 2.47E−05 | 28805-28815 |
| 210686_x_at | BC001407 | SLC25A16 | 0.000696 | 28816-28826 |
| 211417_x_at | L20493 | GGT1 | 0.000634 | 28827-28837 |
| 211452_x_at | AF130054 | LRRFIP1 | 3.94E−05 | 28838-28848 |
| 211600_at | U20489 | PTPRO | 0.000506 | 28849-28859 |
| 211941_s_at | BE969671 | PEBP1 | 0.000148 | 28860-28870 |
| 211946_s_at | AL096857 | BAT2L2 | 0.000931 | 28871-28881 |
| 211974_x_at | AL513759 | RBPJ | 7.16E−05 | 351-361 |
| 211994_at | AI742553 | WNK1 | 0.000303 | 28882-28892 |
| 212112_s_at | AI816243 | STX12 | 0.000471 | 28893-28903 |
| 212239_at | AI680192 | PIK3R1 | 0.000135 | 28904-28914 |
| 212386_at | BF592782 | TCF4 | 0.000268 | 28915-28925 |
| 212586_at | AA195244 | CAST | 0.000913 | 28926-28936 |
| 212587_s_at | AI809341 | PTPRC | 0.000322 | 362-372 |
| 212616_at | BF668950 | CHD9 | 0.000167 | 28937-28947 |
| 212646_at | D42043 | RFTN1 | 0.000025 | 28948-28958 |
| 212786_at | AA731693 | CLEC16A | 0.000216 | 28959-28969 |
| 212873_at | BE349017 | HMHA1 | 0.000702 | 28970-28980 |
| 212944_at | AK024896 | SLC5A3 | 4.39E−05 | 28981-28991 |
| 212995_x_at | BG255188 | MZT2B | 0.000713 | 28992-29002 |
| 213175_s_at | AL049650 | SNRPB | 0.000101 | 29003-29013 |
| 213295_at | AA555096 | CYLD | 0.000371 | 29014-29024 |
| 213639_s_at | AI871396 | ZNF500 | 0.000791 | 29025-29035 |
| 213850_s_at | AI984932 | SRSF2IP | 0.000391 | 29036-29046 |
| 213857_s_at | BG230614 | CD47 | 0.000351 | 29047-29057 |
| 213911_s_at | BF718636 | H2AFZ | 0.000057 | 29058-29068 |
| 214035_x_at | AA308853 | LOC399491 | 0.000176 | 29069-29076 |
| 214141_x_at | BF033354 | SRSF7 | 0.000356 | 29077-29087 |
| 214464_at | NM_003607 | CDC42BPA | 0.000339 | 29088-29098 |
| 214494_s_at | NM_005200 | SPG7 | 0.000592 | 29099-29109 |
| 214686_at | AA868898 | ZNF266 | 0.0005 | 29110-29120 |
| 214730_s_at | AK025457 | GLG1 | 0.000424 | 29121-29131 |
| 214938_x_at | AF283771 | HMGB1 | 0.000633 | 29132-29142 |
| 214988_s_at | X63071 | SON | 0.000237 | 29143-29153 |
| 215333_x_at | X08020 | GSTM1 | 0.000756 | 29154-29164 |
| 217757_at | NM_000014 | A2M | 0.000278 | 29165-29175 |
| 217791_s_at | NM_002860 | ALDH18A1 | 0.000191 | 29176-29186 |
| 218004_at | NM_018045 | BSDC1 | 0.000002 | 29187-29197 |
| 218012_at | NM_022117 | TSPYL2 | 0.000896 | 29198-29208 |
| 218118_s_at | NM_006327 | TIMM23 | 0.000331 | 29209-29219 |
| 218127_at | AI804118 | NFYB | 0.000492 | 29220-29230 |
| 218160_at | NM_014222 | NDUFA8 | 0.000903 | 29231-29241 |
| 218251_at | NM_021242 | MID1IP1 | 0.000349 | 29242-29252 |
| 218552_at | NM_018281 | ECHDC2 | 0.00027 | 29253-29263 |
| 218686_s_at | NM_022450 | RHBDF1 | 0.000251 | 29264-29274 |
| 218873_at | NM_017710 | GON4L | 0.000111 | 29275-29285 |
| 219176_at | NM_024520 | C2orf47 | 0.00043 | 29286-29296 |
| 220036_s_at | NM_018113 | LMBR1L | 0.000225 | 29297-29307 |
| 220079_s_at | NM_018391 | USP48 | 2.24E−05 | 29308-29318 |
| 221073_s_at | NM_006092 | NOD1 | 0.000737 | 29319-29329 |
| 221249_s_at | NM_030802 | FAM117A | 1E−07 | 29330-29340 |
| 221495_s_at | AF322111 | TCF25 | 0.000377 | 29341-29351 |
| 221501_x_at | AF229069 | PKD1P1 | 0.000359 | 29352-29355 |
| 221510_s_at | AF158555 | GLS | 0.000824 | 29356-29366 |
| 221718_s_at | M90360 | AKAP13 | 0.000439 | 373-383 |
| 221743_at | AI472139 | CELF1 | 0.000168 | 29367-29377 |
| 221844_x_at | AV756161 | SPCS3 | 0.00099 | 29378-29388 |
| 221899_at | AI809961 | N4BP2L2 | 4.59E−05 | 29389-29399 |
| 221932_s_at | AA133341 | GLRX5 | 0.000189 | 29400-29410 |
| 221937_at | AI472320 | SYNRG | 0.0007 | 29411-29421 |
| 221942_s_at | AI719730 | GUCY1A3 | 0.000399 | 29422-29432 |
| 32259_at | AB002386 | EZH1 | 0.00059 | 29433-29448 |
| 40093_at | X83425 | BCAM | 5.71E−05 | 29449-29464 |
| 46256_at | AA522670 | SPSB3 | 0.000137 | 27865-27880 |
| 57082_at | AA169780 | LDLRAP1 | 0.000418 | 29465-29480 |
| 65770_at | AI186666 | RHOT2 | 0.000858 | 29481-29496 |

TABLE 9
Annotated list of 37 genes used to predict ACT benefit in NSCLC.
Cox-Regression p-value reflects significance of gene expression
pattern to outcome in ACT-treated patients, independent to age,
gender, stage, smoking history and 160-gene prognosis score.

| Affymetrix | Genbank | Gene | | |
|---|---|---|---|---|
| Probe ID | Accession no | Symbol | p-value | SEQ ID NOS |
| 201250_s_at | NM_006516 | SLC2A1 | 0.0007074 | 29497-29507 |
| 202504_at | NM_012101 | TRIM29 | 0.00091 | 384-394 |
| 202551_s_at | BG546884 | CRIM1 | 0.0003722 | 29508-29518 |
| 202698_x_at | NM_001861 | COX4I1 | 0.0009066 | 29519-29529 |
| 203405_at | NM_003720 | PSMG1 | 0.0004087 | 29530-29540 |
| 203694_s_at | NM_003587 | DHX16 | 0.0004141 | 29541-29551 |
| 203822_s_at | NM_006874 | ELF2 | 0.0007314 | 29552-29562 |
| 204303_s_at | NM_014772 | KIAA0427 | 0.0001162 | 29563-29573 |
| 204429_s_at | BE560461 | SLC2A5 | 0.0005819 | 29574-29584 |
| 205106_at | NM_014221 | MTCP1 | 0.0004813 | 29585-29595 |
| 206411_s_at | NM_007314 | ABL2 | 0.0008467 | 29596-29606 |
| 206414_s_at | NM_003887 | ASAP2 | 0.0004048 | 29607-29617 |
| 206432_at | NM_005328 | HAS2 | 0.0004209 | 29618-29628 |
| 206477_s_at | NM_002516 | NOVA2 | 0.0000115 | 29629-29639 |
| 206833_s_at | NM_001108 | ACYP2 | 0.0007803 | 29640-29650 |
| 206872_at | NM_005074 | SLC17A1 | 0.0000778 | 29651-29661 |
| 209020_at | AF217514 | C20orf111 | 0.0007324 | 29662-29672 |
| 209114_at | AF133425 | TSPAN1 | 0.0003499 | 395-405 |
| 210357_s_at | BC000669 | SMOX | 0.0003298 | 29673-29683 |
| 210456_at | AF148464 | PCYT1B | 0.0006394 | 29684-29694 |
| 210754_s_at | M79321 | LYN | 0.0005255 | 406-416 |
| 210775_x_at | AB015653 | CASP9 | 0.0003883 | 29695-29705 |
| 210844_x_at | D14705 | CTNNA1 | 0.0009938 | 417-427 |
| 213050_at | AA594937 | COBL | 0.0008898 | 428-438 |
| 213853_at | AL050199 | DNAJC24 | 0.0009609 | 29706-29716 |
| 215543_s_at | AB011181 | LARGE | 0.0009219 | 29717-29727 |
| 218149_s_at | NM_017606 | ZNF395 | 0.0003799 | 29728-29738 |
| 218665_at | NM_012193 | FZD4 | 0.0007849 | 29739-29749 |
| 218845_at | NM_020185 | DUSP22 | 0.0007801 | 29750-29760 |
| 219429_at | NM_024306 | FA2H | 0.0007887 | 439-449 |
| 219496_at | NM_023016 | ANKRD57 | 0.0000767 | 29761-29771 |
| 220658_s_at | NM_020183 | ARNTL2 | 0.0000575 | 450-460 |
| 221036_s_at | NM_031301 | APH1B | 0.0005189 | 29772-29782 |
| 221234_s_at | NM_021813 | BACH2 | 0.0001448 | 29783-29793 |
| 35666_at | U38276 | SEMA3F | 0.0004552 | 29794-29809 |
| 40560_at | U28049 | TBX2 | 0.0009767 | 461-476 |
| 46256_at | AA522670 | SPSB3 | 0.0004097 | 27865-27880 |

### REFERENCES

[0223] E. Bair, et al. (2004), Semi-supervised methods to predict patient survival from gene expression data, PLoS Biol, 2: E108
[0224] A. Bild, et al. (2006), Oncogenic pathway signatures in human cancers as a guide to targeted therapies, Nature, 439: 353-357
[0225] G. Bloom, et al. (2004), Multi-platform, multi-site, microarray-based human tumor classification, The American journal of pathology, 164: 9-16
[0226] B. M. Bolstad, et al. (2003), A comparison of normalization methods for high density oligonucleotide array data based on variance and bias, Bioinformatics, 19: 185-193
[0227] M. P. Brown, et al. (2000), Knowledge-based analysis of microarray gene expression data by using support vector machines, Proc Natl Acad Sci USA, 97: 262-267
[0228] E. C. Burton, et al. (1998), Autopsy diagnoses of malignant neoplasms: how often are clinical diagnoses incorrect?, Jama, 280: 1245-8
[0229] D. R. Cox (1972), Regression models and life-tables (with discussion), Journal of the Royal Statistical Society, B: 187-220
[0230] G. Dennis, Jr., et al. (2003), DAVID: Database for Annotation, Visualization, and Integrated Discovery, Genome biology, 4: 3
[0231] C. Desmedt, et al. (2007), Strong Time Dependence of the 76-Gene Prognostic Signature for Node-Negative Breast Cancer Patients in the TRANSBIG Multicenter Independent Validation Series, Clinical Cancer Research, 13: 3207-3214
[0232] S. Dudoit, et al. (2002), Comparison of Discrimination Methods for the Classification of Tumors Using Gene Expression Dat, Journal of the American Statistical Association, 97: 77-87
[0233] C. I. Dumur, et al. (2008), Interlaboratory performance of a microarray-based gene expression test to determine tissue of origin in poorly differentiated and undifferentiated cancers, J Mol Diagn, 10: 67-77
[0234] T. Egawa-Takata, et al. Early reduction of glucose uptake after cisplatin treatment is a marker of cisplatin sensitivity in ovarian cancer, Cancer Science, 101: 2171-2178
[0235] R. C. Gentleman, et al. (2004), Bioconductor: open software development for computational biology and bioinformatics, Genome biology, 5: R80
[0236] J. D. Hoheisel (2006), Microarray technology: beyond transcript profiling and genotype analysis, Nat Rev Genet, 7: 200-210
[0237] H. M. Horlings, et al. (2008), Gene Expression Profiling to Identify the Histogenetic Origin of Metastatic Adenocarcinomas of Unknown Primary, J Clin Oncol, 26: 4435-4441
[0238] R. A. Irizarry, et al. (2003), Exploration, normalization, and summaries of high density oligonucleotide array probe level data, Biostatistics, 4: 249-264
[0239] A. V. Ivshina, et al. (2006), Genetic Reclassification of Histologic Grade Delineates New Clinical Subtypes of Breast Cancer, Cancer Res, 66: 10292-10301
[0240] R. N. Jorissen, et al. (2009), Metastasis-Associated Gene Expression Changes Predict Poor Outcomes in Patients with Dukes Stage B and C Colorectal Cancer, Clinical Cancer Research, 15: 7642-7651
[0241] H. M. Khandwala, et al. (2000), The Effects of Insulin-Like Growth Factors on Tumorigenesis and Neoplastic Growth, Endocr Rev, 21: 215-244
[0242] K. Konishi, et al. (1999), Clinicopathological differences between colonic and rectal carcinomas: are they based on the same mechanism of carcinogenesis?, Gut, 45: 818-21
[0243] D. Kowalski, et al. (2008), Dysregulation of Purine Nucleotide Biosynthesis Pathways Modulates Cisplatin Cytotoxicity in Saccharomyces cerevisiae, Molecular Pharmacology, 74: 1092-1100
[0244] C. Li, et al. (2011), Oncogenic role of EAPII in lung cancer development and its activation of the MAPK-ERK pathway, Oncogene,
[0245] S. Loi, et al. (2007), Definition of Clinically Distinct Molecular Subtypes in Estrogen Receptor-Positive Breast Carcinomas Through Genomic Grade, J Clin Oncol, 25: 1239-1246
[0246] X. J. Ma, et al. (2006), Molecular classification of human cancers using a 92-gene real-time quantitative polymerase chain reaction assay, 130: 465-473
[0247] N. Pavlidis, et al. (2003), Diagnostic and therapeutic management of cancer of an unknown primary, Eur J Cancer, 39: 1990-2005
[0248] K. M. W. Pisters, et al. (2007), Cancer Care Ontario and American Society of Clinical Oncology Adjuvant Chemotherapy and Adjuvant Radiation Therapy for Stages I-IIIA Resectable Nonâ [symbol] “Small-Cell Lung Cancer Guideline, Journal of Clinical Oncology, 25: 5506-5518
[0249] I. Robieux, et al. (1996), Pharmacokinetics of vinorelbine in patients with liver metastases, Clin Pharmacol Ther, 59: 32-40
[0250] M. Schmidt, et al. (2008), The Humoral Immune System Has a Key Prognostic Impact in Node-Negative Breast Cancer, Cancer Res, 68: 5405-5413
[0251] K. Shedden, et al. (2008), Gene expression-based survival prediction in lung adenocarcinoma: a multi-site, blinded validation study, Nat Med, 14: 822-827
[0252] R. Simon (2005), Roadmap for Developing and Validating Therapeutically Relevant Genomic Classifiers, J Clin Oncol, 23: 7332-7341
[0253] R. Simon, et al. (2007), Analysis of Gene Expression Data Using BRB-Array Tools, Cancer Inform, 3: 11-7
[0254] J. J. Smith, et al. (2009), Experimentally Derived Metastasis Gene Expression Profile Predicts Recurrence and Death in Patients With Colon Cancer, Gastroenterology, 138: 958-968
[0255] J. Subramanian, et al. What should physicians look for in evaluating prognostic gene-expression signatures?, Nat Rev Clin Oncol, 7: 327-334
[0256] J. Subramanian, et al. (2010), Gene Expression Based Prognostic Signatures in Lung Cancer: Ready for Clinical Use?, Journal of the National Cancer Institute, 102: 464-474
[0257] T. Takeuchi, et al. (2006), Expression Profile-Defined Classification of Lung Adenocarcinoma Shows Close Relationship With Underlying Major Genetic Changes and Clinicopathologic Behaviors, Journal of Clinical Oncology, 24: 1679-1688
[0258] R. Tibshirani, et al. (2002), Diagnosis of multiple cancer types by shrunken centroids of gene expression, Proceedings of the National Academy of Sciences, 99: 6567-6572
[0259] R. W. Tothill, et al. (2005), An expression-based site of origin diagnostic method designed for clinical application to cancer of unknown origin, Cancer Res, 65: 4031-4040
[0260] R. K. Van Laar (2010), An online gene expression assay for determining adjuvant therapy eligibility in patients with stage 2 or 3 colon cancer, British journal of cancer, 103: 1852-1857
[0261] R. K. van Laar, et al. (2009), Implementation of a novel microarray-based diagnostic test for cancer of unknown primary, Int J Cancer, 125: 1390-1397
[0262] G. R. Varadhachary, et al. (2004), Diagnostic strategies for unknown primary cancer, Cancer, 100: 1776-85
[0263] Z. Wu, et al. (2004), A Model-Based Background Adjustment for Oligonucleotide Expression Arrays, Journal of the American Statistical Association, 99: 909-917
[0264] C.-Q. Zhu, et al. (2010), Prognostic and Predictive Gene Signature for Adjuvant Chemotherapy in Resected Non-Small-Cell Lung Cancer, Journal of Clinical Oncology, 28: 4417-4424

The application's sequence listing, which the Patent Office published only in electronic form, follows.

SEQUENCE LISTING (29809 sequences)

SEQ ID NO: 1 - DNA, 25 bp, Homo sapiens
aataaaaaaaccttcagctgtgcta

SEQ ID NO: 2 - DNA, 25 bp, Homo sapiens
aattctccattatgttcgtggtgta

SEQ ID NO: 3 - DNA, 25 bp, Homo sapiens
aattcttcagggagtgtcacctcaa

SEQ ID NO: 4 - DNA, 25 bp, Homo sapiens
aattgtgctcttttctaatccaaag

SEQ ID NO: 5 - DNA, 25 bp, Homo sapiens
atattacctctgtataaaattcttc

SEQ ID NO: 6 - DNA, 25 bp, Homo sapiens
atgggtacccatttgataagagaaa

SEQ ID NO: 7 - DNA, 25 bp, Homo sapiens
caaagggtatatttgcagcatgctt

SEQ ID NO: 8 - DNA, 25 bp, Homo sapiens
ctgtgctaaacagtatattacctct

SEQ ID NO: 9 - DNA, 25 bp, Homo sapiens
gagtgtcacctcaaatgcaatactt

SEQ ID NO: 10 - DNA, 25 bp, Homo sapiens
gtgtgtgagcatgggtacccatttg

SEQ ID NO: 11 - DNA, 25 bp, Homo sapiens
tgcaatactttgggttggtttcttt

SEQ ID NO: 12 - DNA, 25 bp, Homo sapiens
aagttggtcctttacactcaggctt

SEQ ID NO: 13 - DNA, 25 bp, Homo sapiens
agaaaaatcatgtttgctctcccgg

SEQ ID NO: 14 - DNA, 25 bp, Homo sapiens
atatttgtatagttgcttgcctgat

SEQ ID NO: 15 - DNA, 25 bp, Homo sapiens
atcgctgtgtgttagttcccaacat

SEQ ID NO: 16 - DNA, 25 bp, Homo sapiens
ctctgcatctactcccaagtatggg

SEQ ID NO: 17 - DNA, 25 bp, Homo sapiens
gatgattattttcaaggccctcagc

SEQ ID NO: 18 - DNA, 25 bp, Homo sapiens
gtttcatatttcttatcaccacagt

SEQ ID NO: 19 - DNA, 25 bp, Homo sapiens
taagaaccttgcctgaacatccttc

SEQ ID NO: 20 - DNA, 25 bp, Homo sapiens
tcccggttcttccagtggtttgaga

SEQ ID NO: 21 - DNA, 25 bp, Homo sapiens
tgcaaccaactacaaccaagctctc

SEQ ID NO: 22 - DNA, 25 bp, Homo sapiens
ttatgccggatgtgcttttctccaa

SEQ ID NO: 23 - DNA, 25 bp, Homo sapiens
acatcactacctgcagtttcgtggc

SEQ ID NO: 24 - DNA, 25 bp, Homo sapiens
aggatggactcttgcacatcactac

SEQ ID NO: 25 - DNA, 25 bp, Homo sapiens
ccctggaacagcctgagcttagctc

SEQ ID NO: 26 - DNA, 25 bp, Homo sapiens
gaccaccttataccagcgttatgag

SEQ ID NO: 27 - DNA, 25 bp, Homo sapiens
ggagagtgtctgcggatacttccac

SEQ ID NO: 28 - DNA, 25 bp, Homo sapiens
ggcactcattgcttgtggacggacc

SEQ ID NO: 29 - DNA, 25 bp, Homo sapiens
ggttccaagccttaggggatgccgc

SEQ ID NO: 30 - DNA, 25 bp, Homo sapiens
gtcccacaaccgcagcgaggagttt

SEQ ID NO: 31 - DNA, 25 bp, Homo sapiens
tatccatcccctgcaaactgcagag

SEQ ID NO: 32 - DNA, 25 bp, Homo sapiens
tcagggccaagttcgtggggacacc

SEQ ID NO: 33 - DNA, 25 bp, Homo sapiens
tgcacagtgtttccctgtttatcca

SEQ ID NO: 34 - DNA, 25 bp, Homo sapiens
agaatgatgtccccgttgtatgtat

SEQ ID NO: 35 - DNA, 25 bp, Homo sapiens
agggaaccgtgataagcctttctgg

SEQ ID NO: 36 - DNA, 25 bp, Homo sapiens
cacgtaaatgcgtccctgtacagat

SEQ ID NO: 37 - DNA, 25 bp, Homo sapiens
cctccagtctggatcgtttgacggg

SEQ ID NO: 38 - DNA, 25 bp, Homo sapiens
cgaactggactgtgtgcaacgcttt

SEQ ID NO: 39 - DNA, 25 bp, Homo sapiens
ctgttgcactgatgtccggagagac

SEQ ID NO: 40 - DNA, 25 bp, Homo sapiens
gaaatcgccgtgttactgttgcact

SEQ ID NO: 41 - DNA, 25 bp, Homo sapiens
gcctttctggtttcggagcacgtaa

SEQ ID NO: 42 - DNA, 25 bp, Homo sapiens
gtcagactcccgcgtgaagatgtca

SEQ ID NO: 43 - DNA, 25 bp, Homo sapiens
ttgttcagtgactattctcggggcc

SEQ ID NO: 44 - DNA, 25 bp, Homo sapiens
tttgacgggacttcaggttctttct

SEQ ID NO: 45 - DNA, 25 bp, Homo sapiens
aaatggctgtatcggcctgtatggg

SEQ ID NO: 46 - DNA, 25 bp, Homo sapiens
acgggttacaactggttcattctga

SEQ ID NO: 47 - DNA, 25 bp, Homo sapiens
agccttgcctttgtaatttgacttc

SEQ ID NO: 48 - DNA, 25 bp, Homo sapiens
atactggcgtactttatattctcta

SEQ ID NO: 49 - DNA, 25 bp, Homo sapiens
ggcctgtatgggactgtaatgcgct

SEQ ID NO: 50 - DNA, 25 bp, Homo sapiens
gtaatgcgcttagtggtctgacata

SEQ ID NO: 51 - DNA, 25 bp, Homo sapiens
gtgcccaagtaattcactacagcct

SEQ ID NO: 52 - DNA, 25 bp, Homo sapiens
gttggcaatcaaagcatgcacttgt

SEQ ID NO: 53 - DNA, 25 bp, Homo sapiens
taatttgacttctgacatgttggca

SEQ ID NO: 54 - DNA, 25 bp, Homo sapiens
tcactacagcctaaagccttgcctt

SEQ ID NO: 55 - DNA, 25 bp, Homo sapiens
ttctgttctgtcatgtgccacaaaa

SEQ ID NO: 56 - DNA, 25 bp, Homo sapiens
cagagagggacgacatcctgtgccc

SEQ ID NO: 57 - DNA, 25 bp, Homo sapiens
ctcacccaggcaatcttgccttctg

SEQ ID NO: 58 - DNA, 25 bp, Homo sapiens
cttccagccacattgagactttctt

SEQ ID NO: 59 - DNA, 25 bp, Homo sapiens
gagactttcttctagtgcttttcag

SEQ ID NO: 60 - DNA, 25 bp, Homo sapiens
gatactcacgtttgcttaaaccctt

SEQ ID NO: 61 - DNA, 25 bp, Homo sapiens
gcgtggcttcctcacagagagggac

SEQ ID NO: 62 - DNA, 25 bp, Homo sapiens
gtggcataacgactgctttaactgt

SEQ ID NO: 63 - DNA, 25 bp, Homo sapiens
taactgtaagaagtgctccctctca

SEQ ID NO: 64 - DNA, 25 bp, Homo sapiens
tatttacagctctgtaacctcccgt

SEQ ID NO: 65 - DNA, 25 bp, Homo sapiens
tcccgttgcgtcaagtctaaaccaa

SEQ ID NO: 66 - DNA, 25 bp, Homo sapiens
ttaaaccctttagtgctttgtgata

SEQ ID NO: 67 - DNA, 25 bp, Homo sapiens
atttgactatcaagacttttagcat

SEQ ID NO: 68 - DNA, 25 bp, Homo sapiens
ctgtgtgttcctctgaacaaagcgg

SEQ ID NO: 69 - DNA, 25 bp, Homo sapiens
gactaatccatacacagttaaccta

SEQ ID NO: 70 - DNA, 25 bp, Homo sapiens
gcatgaaaaagtattccgctgggaa

SEQ ID NO: 71 - DNA, 25 bp, Homo sapiens
gctacagtgttaatctgcatggtct

SEQ ID NO: 72 - DNA, 25 bp, Homo sapiens
taatgaaaaaccctctctctatata

SEQ ID NO: 73 - DNA, 25 bp, Homo sapiens
tacacagttaacctaatgccaaata

SEQ ID NO: 74 - DNA, 25 bp, Homo sapiens
tatgtgggcattcttgatacttcaa

SEQ ID NO: 75 - DNA, 25 bp, Homo sapiens
tccgctgggaattgagccatgccac

SEQ ID NO: 76 - DNA, 25 bp, Homo sapiens
tctgcatggtctttaagcctgctgt

SEQ ID NO: 77 - DNA, 25 bp, Homo sapiens
ttaagcctgctgtagttgagttgca

SEQ ID NO: 78 - DNA, 25 bp, Homo sapiens
atggcgaagtctttagtctttttca

SEQ ID NO: 79 - DNA, 25 bp, Homo sapiens
atttgcagcatgcttgactttacca

SEQ ID NO: 80 - DNA, 25 bp, Homo sapiens
cactaagaccttgttatggcgaagt

SEQ ID NO: 81 - DNA, 25 bp, Homo sapiens
cggacactattatcactaagacctt

SEQ ID NO: 82 - DNA, 25 bp, Homo sapiens
gactttaccaattctgatgacatct

SEQ ID NO: 83 - DNA, 25 bp, Homo sapiens
gataatctgggaaagacaccaaatc

SEQ ID NO: 84 - DNA, 25 bp, Homo sapiens
gatgacatctttacggacactatta

SEQ ID NO: 85 - DNA, 25 bp, Homo sapiens
gttgtcgcaaaggggataatctggg

SEQ ID NO: 86 - DNA, 25 bp, Homo sapiens
tatgccttacctttgtaaatatttt

SEQ ID NO: 87 - DNA, 25 bp, Homo sapiens
tgcttgtgttgtcgcaaaggggata

SEQ ID NO: 88 - DNA, 25 bp, Homo sapiens
ttagtctttttcatgtattttcctc

SEQ ID NO: 89 - DNA, 25 bp, Homo sapiens
aatgcttctttctcagtttattggt

SEQ ID NO: 90 - DNA, 25 bp, Homo sapiens
aatttctcactttgcatttagtcaa

SEQ ID NO: 91 - DNA, 25 bp, Homo sapiens
agtcaggaactttccaaagtcagcc

SEQ ID NO: 92 - DNA, 25 bp, Homo sapiens
gaatggtgcatacaaggccatcccc

SEQ ID NO: 93 - DNA, 25 bp, Homo sapiens
gagcaatgagcattccgatgtgatt

SEQ ID NO: 94 - DNA, 25 bp, Homo sapiens
gatagtgcatcttctgaggtcaatt

SEQ ID NO: 95 - DNA, 25 bp, Homo sapiens
gatatgctggttgtagaccccaaaa

SEQ ID NO: 96 - DNA, 25 bp, Homo sapiens
gattgggacagccgtgggaaggaca

SEQ ID NO: 97 - DNA, 25 bp, Homo sapiens
tagtttagtttgtggcttcatggaa

SEQ ID NO: 98 - DNA, 25 bp, Homo sapiens
tcagccgtgaattccacagccatga

SEQ ID NO: 99 - DNA, 25 bp, Homo sapiens
tgaacgcgccttctgattgggacag

SEQ ID NO: 100 - DNA, 25 bp, Homo sapiens
acagatatttaattttgctaacact

SEQ ID NO: 101 - DNA, 25 bp, Homo sapiens
agatattccgtagtacatatttatt

SEQ ID NO: 102 - DNA, 25 bp, Homo sapiens
agtgcagtttttcgagatattccgt

SEQ ID NO: 103 - DNA, 25 bp, Homo sapiens
atgagatgtatcttttgctctctct

SEQ ID NO: 104 - DNA, 25 bp, Homo sapiens
ccctgatcggtgacagtcactagct

SEQ ID NO: 105 - DNA, 25 bp, Homo sapiens
cgtctttgtctctagtgcagttttt

SEQ ID NO: 106 - DNA, 25 bp, Homo sapiens
gaattctacatactaaatctctctc

SEQ ID NO: 107 - DNA, 25 bp, Homo sapiens
ggtgctactgtttatccgtaataat

SEQ ID NO: 108 - DNA, 25 bp, Homo sapiens
gtttttcgagatattccgtagtaca

SEQ ID NO: 109 - DNA, 25 bp, Homo sapiens
tctacatactaaatctctctccttt

SEQ ID NO: 110 - DNA, 25 bp, Homo sapiens
tgacagtcactagcttatcttgaac

SEQ ID NO: 111 - DNA, 25 bp, Homo sapiens
aaacccattgtagcttacctgtaat

SEQ ID NO: 112 - DNA, 25 bp, Homo sapiens
aacatcttcatcagctccagactga

SEQ ID NO: 113 - DNA, 25 bp, Homo sapiens
acaattcatcattttataccttcaa

SEQ ID NO: 114 - DNA, 25 bp, Homo sapiens
acattccagctacaatacttccatt

SEQ ID NO: 115 - DNA, 25 bp, Homo sapiens
caattttctctgtggcccaaacttg

SEQ ID NO: 116 - DNA, 25 bp, Homo sapiens
gaagcacattaaccatttctatagc

SEQ ID NO: 117 - DNA, 25 bp, Homo sapiens
gctggctgttatctcaacatcttca

SEQ ID NO: 118 - DNA, 25 bp, Homo sapiens
gggtcacaaaccctgttgagataaa

SEQ ID NO: 119 - DNA, 25 bp, Homo sapiens
ggtgcaactgtgacttgggtctggt

SEQ ID NO: 120 - DNA, 25 bp, Homo sapiens
tgagtcagctgattttcacttccca

SEQ ID NO: 121 - DNA, 25 bp, Homo sapiens
ttcacttcccactgaggttgtcata

SEQ ID NO: 122 - DNA, 25 bp, Homo sapiens
aaagaagtgctgccgcgcagtgtgg

SEQ ID NO: 123 - DNA, 25 bp, Homo sapiens
aatacataccacgctagggctggct

SEQ ID NO: 124 - DNA, 25 bp, Homo sapiens
aattcagcaaagtggttccctctct

SEQ ID NO: 125 - DNA, 25 bp, Homo sapiens
cggactcatgatttcttcttaccag

SEQ ID NO: 126 - DNA, 25 bp, Homo sapiens
ctgttccagtggtaagctatgtccc

SEQ ID NO: 127 - DNA, 25 bp, Homo sapiens
gatgctgggtccatatcacacacat

SEQ ID NO: 128 - DNA, 25 bp, Homo sapiens
gtaagggcactgacggactcatgat

SEQ ID NO: 129 - DNA, 25 bp, Homo sapiens
gtgcaacactggtctgctgttccag

SEQ ID NO: 130 - DNA, 25 bp, Homo sapiens
gtggttccctctcttagggacagtc

SEQ ID NO: 131 - DNA, 25 bp, Homo sapiens
tcttaccagatgctttcctgttctt

SEQ ID NO: 132 - DNA, 25 bp, Homo sapiens
tgaggccactggagacgcatatgag

SEQ ID NO: 133 - DNA, 25 bp, Homo sapiens
aactttcagagctatcatgagccaa

SEQ ID NO: 134 - DNA, 25 bp, Homo sapiens
cacaggtgtagcactcccaaagcaa

SEQ ID NO: 135 - DNA, 25 bp, Homo sapiens
caggtgtagcactcccaaagcaaga

SEQ ID NO: 136 - DNA, 25 bp, Homo sapiens
cctttcagccttcacagcagtgagc

SEQ ID NO: 137 - DNA, 25 bp, Homo sapiens
cttgtctcaattgtgccatcaactt

SEQ ID NO: 138 - DNA, 25 bp, Homo sapiens
ctttcagccttcacagcagtgagct

SEQ ID NO: 139 - DNA, 25 bp, Homo sapiens
ggaaagttccagaactccacgtcct

SEQ ID NO: 140 - DNA, 25 bp, Homo sapiens
ggtgtagcactcccaaagcaagact

SEQ ID NO: 141 - DNA, 25 bp, Homo sapiens
gtgtagcactcccaaagcaagactc

SEQ ID NO: 142 - DNA, 25 bp, Homo sapiens
tccttgtctcaattgtgccatcaac

SEQ ID NO: 143 - DNA, 25 bp, Homo sapiens
ttcagagctatcatgagccaacctc

SEQ ID NO: 144 - DNA, 25 bp, Homo sapiens
aaatccagagaccatcaatcctgct

SEQ ID NO: 145 - DNA, 25 bp, Homo sapiens
aagagcatccaaacaaacaagtaat

SEQ ID NO: 146 - DNA, 25 bp, Homo sapiens
accggtcacagctacaaatccagag

SEQ ID NO: 147 - DNA, 25 bp, Homo sapiens
agaccatcaatcctgctagagtgca

SEQ ID NO: 148 - DNA, 25 bp, Homo sapiens
caccatgaccggtcacagctacaaa

SEQ ID NO: 149 - DNA, 25 bp, Homo sapiens
cacccaagggtggctgaccaagact

SEQ ID NO: 150 - DNA, 25 bp, Homo sapiens
ctgacatgagtctgctggaaagagc

SEQ ID NO: 151 - DNA, 25 bp, Homo sapiens
gaccaagactgcagagtctcctcca

SEQ ID NO: 152 - DNA, 25 bp, Homo sapiens
gcctcctgacatgagtctgctggaa

SEQ ID NO: 153 - DNA, 25 bp, Homo sapiens
ggcaagcacccaagggtggctgacc

SEQ ID NO: 154 - DNA, 25 bp, Homo sapiens
ggcatttaactaccagcatccagtg

SEQ ID NO: 155 - DNA, 25 bp, Homo sapiens
aagcgagttatcgtcttctgtattt

SEQ ID NO: 156 - DNA, 25 bp, Homo sapiens
agcaagcgagttatcgtcttctgta

SEQ ID NO: 157 - DNA, 25 bp, Homo sapiens
caagcgagttatcgtcttctgtatt

SEQ ID NO: 158 - DNA, 25 bp, Homo sapiens
cctgacttacagcaagcgagttatc

SEQ ID NO: 159 - DNA, 25 bp, Homo sapiens
ctgacttacagcaagcgagttatcg

SEQ ID NO: 160 - DNA, 25 bp, Homo sapiens
gcgagttatcgtcttctgtattttg

SEQ ID NO: 161 - DNA, 25 bp, Homo sapiens
tacagcaagcgagttatcgtcttct

SEQ ID NO: 162 - DNA, 25 bp, Homo sapiens
tattgcccggctcctagaatttatt

SEQ ID NO: 163 - DNA, 25 bp, Homo sapiens
tatttcctgacttacagcaagcgag

SEQ ID NO: 164 - DNA, 25 bp, Homo sapiens
tcctgacttacagcaagcgagttat

SEQ ID NO: 165 - DNA, 25 bp, Homo sapiens
tgacttacagcaagcgagttatcgt

SEQ ID NO: 166 - DNA, 25 bp, Homo sapiens
ttacagcaagcgagttatcgtcttc

SEQ ID NO: 167 - DNA, 25 bp, Homo sapiens
ttatttcctgacttacagcaagcga

SEQ ID NO: 168 - DNA, 25 bp, Homo sapiens
ttgcacggatctaagttattctccc

SEQ ID NO: 169 - DNA, 25 bp, Homo sapiens
tttatttcctgacttacagcaagcg

SEQ ID NO: 170 - DNA, 25 bp, Homo sapiens
tttcctgacttacagcaagcgagtt

SEQ ID NO: 171 - DNA, 25 bp, Homo sapiens
aaccaccagtgcccaaagtctgtgt

SEQ ID NO: 172 - DNA, 25 bp, Homo sapiens
ctagactttctgttggtgtatcccc

SEQ ID NO: 173 - DNA, 25 bp, Homo sapiens
gaactacgcttgctcattttttctt

SEQ ID NO: 174 - DNA, 25 bp, Homo sapiens
gaaggatggcacctaaaccaccagt

SEQ ID NO: 175 - DNA, 25 bp, Homo sapiens
gggcagctagttcgtagctttccca

SEQ ID NO: 176 - DNA, 25 bp, Homo sapiens
gggttggtgcttctaacctgatggc

SEQ ID NO: 177 - DNA, 25 bp, Homo sapiens
gttgagtcgtcatcacttttcagtg

SEQ ID NO: 178 - DNA, 25 bp, Homo sapiens
gttgtgccttttatagctattactg

SEQ ID NO: 179 - DNA, 25 bp, Homo sapiens
tcccccccctgtatagttaggatag

SEQ ID NO: 180 - DNA, 25 bp, Homo sapiens
ttgactcaaatctccagtattcttg

SEQ ID NO: 181 - DNA, 25 bp, Homo sapiens
tttctcttcatactttttttcacag

SEQ ID NO: 182 - DNA, 25 bp, Homo sapiens
gaatgttctccaagcagcaatccaa

SEQ ID NO: 183 - DNA, 25 bp, Homo sapiens
ggagaaactaaatctggttgcccca

SEQ ID NO: 184 - DNA, 25 bp, Homo sapiens
agcagcgcagatagcacttcagctc

SEQ ID NO: 185 - DNA, 25 bp, Homo sapiens
caaagtcctaagcgccattctgggt

SEQ ID NO: 186 - DNA, 25 bp, Homo sapiens
caagccctaggaaaagcagcgcaga

SEQ ID NO: 187 - DNA, 25 bp, Homo sapiens
ctggtcttattttgggaggcactct

SEQ ID NO: 188 - DNA, 25 bp, Homo sapiens
ctttgtcttcactggtcttattttg

SEQ ID NO: 189 - DNA, 25 bp, Homo sapiens
gaagcgagattccaaaactgacagc

SEQ ID NO: 190 - DNA, 25 bp, Homo sapiens
gaatccagtggaacccaaagtccta

SEQ ID NO: 191 - DNA, 25 bp, Homo sapiens
gagggtttttgttctggaagccata

SEQ ID NO: 192 - DNA, 25 bp, Homo sapiens
tcagatcccaactccagtgaataac

SEQ ID NO: 193 - DNA, 25 bp, Homo sapiens
tctgggtcttaccttgtgacatctg

SEQ ID NO: 194 - DNA, 25 bp, Homo sapiens
ttgctgttatcaatcatttctagat

SEQ ID NO: 195 - DNA, 25 bp, Homo sapiens
acaattcccaatgttccaggtgagg

SEQ ID NO: 196 - DNA, 25 bp, Homo sapiens
agagacgtggctggcccagaatggc

SEQ ID NO: 197 - DNA, 25 bp, Homo sapiens
agtccccagggggtactctggagtg

SEQ ID NO: 198 - DNA, 25 bp, Homo sapiens
caccattgggcactgccatgcagag

SEQ ID NO: 199 - DNA, 25 bp, Homo sapiens
ccctggtgccccagagacaggagca

SEQ ID NO: 200 - DNA, 25 bp, Homo sapiens
gagcacaagtgggatctgacctggt

SEQ ID NO: 201 - DNA, 25 bp, Homo sapiens
gagccaatctcacattcaagtgttc

SEQ ID NO: 202 - DNA, 25 bp, Homo sapiens
gtaaatgcgggctcagtggaccact

SEQ ID NO: 203 - DNA, 25 bp, Homo sapiens
gtgttcaccaaccactgatgtgttt

SEQ ID NO: 204 - DNA, 25 bp, Homo sapiens
tgatggccgttggactctgtgagat

SEQ ID NO: 205 - DNA, 25 bp, Homo sapiens
tttgaaaggccttccaaacagctcc

SEQ ID NO: 206 - DNA, 25 bp, Homo sapiens
aaagctcagcagggctgtgcttgcc

SEQ ID NO: 207 - DNA, 25 bp, Homo sapiens
actcctcagttacctttaatgggat

SEQ ID NO: 208 - DNA, 25 bp, Homo sapiens
actgggctttctcctgggaattacg

SEQ ID NO: 209 - DNA, 25 bp, Homo sapiens
agccagaatccagtatctcttgctc

SEQ ID NO: 210 - DNA, 25 bp, Homo sapiens
atagtcaggtcttcccagattatct

SEQ ID NO: 211 - DNA, 25 bp, Homo sapiens
cctcctcctccagaagattacgaag

SEQ ID NO: 212 - DNA, 25 bp, Homo sapiens
gaaccagtctttgatgagtctcccc

SEQ ID NO: 213 - DNA, 25 bp, Homo sapiens
gggatttgtggccagagtccaagaa

SEQ ID NO: 214 - DNA, 25 bp, Homo sapiens
tccatcctacaggtaactcctcagt

SEQ ID NO: 215 - DNA, 25 bp, Homo sapiens
tgaagaggacccaccgtgggctcca

SEQ ID NO: 216 - DNA, 25 bp, Homo sapiens
tgggctccacgttcttacttggaaa

SEQ ID NO: 217 - DNA, 25 bp, Homo sapiens
gaagagtttcttggaccttgtggtt

SEQ ID NO: 218 - DNA, 25 bp, Homo sapiens
ggttgccccagatcaactggattta

SEQ ID NO: 219 - DNA, 25 bp, Homo sapiens
accagtgcccaaagtctgtgtgatg

SEQ ID NO: 220 - DNA, 25 bp, Homo sapiens
catactttttttcacagttggctgg

SEQ ID NO: 221 - DNA, 25 bp, Homo sapiens
gatgaactttctcttcatacttttt

SEQ ID NO: 222 - DNA, 25 bp, Homo sapiens
gcagttgagtcgtcatcacttttca

SEQ ID NO: 223 - DNA, 25 bp, Homo sapiens
ggacgtaatctccacagtcaaagaa

SEQ ID NO: 224 - DNA, 25 bp, Homo sapiens
tactgtctggttttaacaatttcct

SEQ ID NO: 225 - DNA, 25 bp, Homo sapiens
attactgctagaatgaacttgtcaa

SEQ ID NO: 226 - DNA, 25 bp, Homo sapiens
ccctccttctaactttattgctgta

SEQ ID NO: 227 - DNA, 25 bp, Homo sapiens
cggagggaactgcagggagaccaac

SEQ ID NO: 228 - DNA, 25 bp, Homo sapiens
ggacatgcgtacttacttgtaaccc

SEQ ID NO: 229 - DNA, 25 bp, Homo sapiens
gggagaccaacttatttagagcgaa

SEQ ID NO: 230 - DNA, 25 bp, Homo sapiens
gtgacctctgataaattactgctag

SEQ ID NO: 231 - DNA, 25 bp, Homo sapiens
taagcattttagggtgggagggact

SEQ ID NO: 232 - DNA, 25 bp, Homo sapiens
tagatatcgctataagtggacatgc

SEQ ID NO: 233 - DNA, 25 bp, Homo sapiens
tgtaaccctttaccctataattgct

SEQ ID NO: 234 - DNA, 25 bp, Homo sapiens
tgtattctcttcactctatatttct

SEQ ID NO: 235 - DNA, 25 bp, Homo sapiens
tttaccctataattgctatccttaa

SEQ ID NO: 236 - DNA, 25 bp, Homo sapiens
acaatactttctatggcttatcagc

SEQ ID NO: 237 - DNA, 25 bp, Homo sapiens
acagtgttctctaatgttacagatg

SEQ ID NO: 238 - DNA, 25 bp, Homo sapiens
agcatctccttacagtcactaatat

SEQ ID NO: 239 - DNA, 25 bp, Homo sapiens
agtgtgggtgaattgctatggcgtg

SEQ ID NO: 240 - DNA, 25 bp, Homo sapiens
gaactgggagagtacggtttccatg

SEQ ID NO: 241 - DNA, 25 bp, Homo sapiens
gctcttcaatagctaagcatctcct

SEQ ID NO: 242 - DNA, 25 bp, Homo sapiens
ggagatttttggaccagtgcagcaa

SEQ ID NO: 243 - DNA, 25 bp, Homo sapiens
ggcttatcagcaggagtgtttacca

SEQ ID NO: 244 - DNA, 25 bp, Homo sapiens
gttacagatgagatgcgcattgcca

SEQ ID NO: 245 - DNA, 25 bp, Homo sapiens
tatggcgtggtaagtgcccagtgcc

SEQ ID NO: 246 - DNA, 25 bp, Homo sapiens
ttgataaagccataacaatctcctc

SEQ ID NO: 247 - DNA, 25 bp, Homo sapiens
gagctatgacgtcgcatgcacgcgt

SEQ ID NO: 248 - DNA, 25 bp, Homo sapiens
gcacgcgtacgtaagcttggatcct

SEQ ID NO: 249 - DNA, 25 bp, Homo sapiens
aaactgaagtgcctggcctacgact

SEQ ID NO: 250 - DNA, 25 bp, Homo sapiens
aggacatctttatggagaccctgaa

SEQ ID NO: 251 - DNA, 25 bp, Homo sapiens
gaaactgaagtgcctggcctacgac

SEQ ID NO: 252 - DNA, 25 bp, Homo sapiens
gaaggccagggaggacatctttatg

SEQ ID NO: 253 - DNA, 25 bp, Homo sapiens
ggagcctgagttacggggagatgtt

SEQ ID NO: 254 - DNA, 25 bp, Homo sapiens
ggaggacatctttatggagaccctg

SEQ ID NO: 255 - DNA, 25 bp, Homo sapiens
gtgcaggagcctgagttacggggag

SEQ ID NO: 256 - DNA, 25 bp, Homo sapiens
tacccagggaaaattgatgtgcact

SEQ ID NO: 257 - DNA, 25 bp, Homo sapiens
tacgacttctacccagggaaaattg

SEQ ID NO: 258 - DNA, 25 bp, Homo sapiens
tgagttacggggagatgttcttcac

SEQ ID NO: 259 - DNA, 25 bp, Homo sapiens
ttcagaaggccagggaggacatctt

SEQ ID NO: 260 - DNA, 25 bp, Homo sapiens
aactccaaactgttgagactgcttt

SEQ ID NO: 261 - DNA, 25 bp, Homo sapiens
actggcaagtcacatgttatcacct

SEQ ID NO: 262 - DNA, 25 bp, Homo sapiens
acttccacggcctgaggtggtttct

SEQ ID NO: 263 - DNA, 25 bp, Homo sapiens
agaaaaggcatctcaactccaaact

SEQ ID NO: 264 - DNA, 25 bp, Homo sapiens
agagcaccatatccttttgctgttg

SEQ ID NO: 265 - DNA, 25 bp, Homo sapiens
aggcacagcgataacttcttcacat

SEQ ID NO: 266 - DNA, 25 bp, Homo sapiens
atgttatcacctactactatttcaa

SEQ ID NO: 267 - DNA, 25 bp, Homo sapiens
attcttcgattatctcctaagtgac

SEQ ID NO: 268 - DNA, 25 bp, Homo sapiens
ggtggtttctcttgagactcgttac

SEQ ID NO: 269 - DNA, 25 bp, Homo sapiens
ttgagactcgttactgggcatcagt

SEQ ID NO: 270 - DNA, 25 bp, Homo sapiens
ttgctttctaccaaacccatagatg

SEQ ID NO: 271 - DNA, 25 bp, Homo sapiens
acttcatcctgggtgctgcagatac

SEQ ID NO: 272 - DNA, 25 bp, Homo sapiens
caccagcctggcagaggacttgctg

SEQ ID NO: 273 - DNA, 25 bp, Homo sapiens
cacttggcctatctgctggacctgc

SEQ ID NO: 274 - DNA, 25 bp, Homo sapiens
catgaagcaccttgatctttggtgt

SEQ ID NO: 275 - DNA, 25 bp, Homo sapiens
ctagaccaggggtgcagccagcttt

SEQ ID NO: 276 - DNA, 25 bp, Homo sapiens
gacctgctggggcagagttgattgc

SEQ ID NO: 277 - DNA, 25 bp, Homo sapiens
gcctatctgctggacctgctggggc

SEQ ID NO: 278 - DNA, 25 bp, Homo sapiens
ggaggcactcgaggagaacgagctc

SEQ ID NO: 279 - DNA, 25 bp, Homo sapiens
ggggtgcatcattggggattctgcc

SEQ ID NO: 280 - DNA, 25 bp, Homo sapiens
gtgctgcagatactgcagtgaagta

SEQ ID NO: 281 - DNA, 25 bp, Homo sapiens
gttccttctgcggctattgctgaac

SEQ ID NO: 282 - DNA, 25 bp, Homo sapiens
tacagtttcactcatgaagcacctt

SEQ ID NO: 283 - DNA, 25 bp, Homo sapiens
tcctgggtgctgcagatactgcagt

SEQ ID NO: 284 - DNA, 25 bp, Homo sapiens
tgatctttggtgtcctggacttcat

SEQ ID NO: 285 - DNA, 25 bp, Homo sapiens
ttctgcctcaggtactttgatagag

SEQ ID NO: 286 - DNA, 25 bp, Homo sapiens
ttgctttggagatcagcctcacctt

SEQ ID NO: 287 - DNA, 25 bp, Homo sapiens
aaattgcggatatgggacacttaaa

SEQ ID NO: 288 - DNA, 25 bp, Homo sapiens
acctagaagtatttttgtctcttag

SEQ ID NO: 289 - DNA, 25 bp, Homo sapiens
actaagctctttgagaactgcttct

SEQ ID NO: 290 - DNA, 25 bp, Homo sapiens
agcatatactgaagtcttttctgtc

SEQ ID NO: 291 - DNA, 25 bp, Homo sapiens
atgtaccccttgttgtagagtataa

SEQ ID NO: 292 - DNA, 25 bp, Homo sapiens
caaagtctgatctggtctagttaac

SEQ ID NO: 293 - DNA, 25 bp, Homo sapiens
cagtatgtctgcagatgtacccctt

SEQ ID NO: 294 - DNA, 25 bp, Homo sapiens
ctctcttcaacggtgacactcagta

SEQ ID NO: 295 - DNA, 25 bp, Homo sapiens
gaactgcttctaagatgccagcata

SEQ ID NO: 296 - DNA, 25 bp, Homo sapiens
ttctctattctctccaatttgttta

SEQ ID NO: 297 - DNA, 25 bp, Homo sapiens
ttctgtcaccaaatttgtacctcta

SEQ ID NO: 298 - DNA, 25 bp, Homo sapiens
aatcatttaatatttccctgtctta

SEQ ID NO: 299 - DNA, 25 bp, Homo sapiens
aatgcctagattcttttgtggttgt

SEQ ID NO: 300 - DNA, 25 bp, Homo sapiens
agctgggagtggaacctgtcgatta

SEQ ID NO: 301 - DNA, 25 bp, Homo sapiens
atcactaacaggtctttgactcagg

SEQ ID NO: 302 - DNA, 25 bp, Homo sapiens
cctgccagagggagttcttcttttg

SEQ ID NO: 303 - DNA, 25 bp, Homo sapiens
cgaggcacgtaccacaacaagtcct

SEQ ID NO: 304 - DNA, 25 bp, Homo sapiens
gatgacaagcaagaccacctcagct

SEQ ID NO: 305 - DNA, 25 bp, Homo sapiens
gtcactcaacgtggtccctagaaca

SEQ ID NO: 306 - DNA, 25 bp, Homo sapiens
gtctccatctcagtacacaatcatt

SEQ ID NO: 307 - DNA, 25 bp, Homo sapiens
tccttattgatcgatcttttcccac

SEQ ID NO: 308 - DNA, 25 bp, Homo sapiens
ttccagtagttcattctaatgccta

SEQ ID NO: 309 - DNA, 25 bp, Homo sapiens
acagtcttggagaagccacctgcac

SEQ ID NO: 310 - DNA, 25 bp, Homo sapiens
accagcccgctcaatgcagaaaaac

SEQ ID NO: 311 - DNA, 25 bp, Homo sapiens
atttctctaagaccattcgcgattt

SEQ ID NO: 312 - DNA, 25 bp, Homo sapiens
cagaccccgaggttgtctggttcaa

SEQ ID NO: 313 - DNA, 25 bp, Homo sapiens
ccgccacttccagatagactacgat

SEQ ID NO: 314 - DNA, 25 bp, Homo sapiens
gagccattggaagactgtcctctat

SEQ ID NO: 315 - DNA, 25 bp, Homo sapiens
ggacgggaactgctctttaattatt

SEQ ID NO: 316 - DNA, 25 bp, Homo sapiens
ggcaatgatctcagggctcagtggc

SEQ ID NO: 317 - DNA, 25 bp, Homo sapiens
gggatgacgatgccaagtacacctg

SEQ ID NO: 318 - DNA, 25 bp, Homo sapiens
gtacacctgcaaggctgtcaacagt

SEQ ID NO: 319 - DNA, 25 bp, Homo sapiens
tgaccagtcaatcagggagtcccgc

SEQ ID NO: 320 - DNA, 25 bp, Homo sapiens
aggaggtgcagtcaacctctaccac

SEQ ID NO: 321 - DNA, 25 bp, Homo sapiens
ctggcctctactacgtggacagtga

SEQ ID NO: 322 - DNA, 25 bp, Homo sapiens
gaagggccttcaattgtatcagtac

SEQ ID NO: 323 - DNA, 25 bp, Homo sapiens
ggagcaggcctatgatctggcccgt

SEQ ID NO: 324 - DNA, 25 bp, Homo sapiens
ggaggatggctggatccgagtctcc

SEQ ID NO: 325 - DNA, 25 bp, Homo sapiens
gtgtttcttggggtgactgtcattg

SEQ ID NO: 326 - DNA, 25 bp, Homo sapiens
taagctctggcacattgacctctat

SEQ ID NO: 327 - DNA, 25 bp, Homo sapiens
taatacggacacagtgacccatcct

SEQ ID NO: 328 - DNA, 25 bp, Homo sapiens
taggttctggctctgtgtatgcata

SEQ ID NO: 329 - DNA, 25 bp, Homo sapiens
tgagaagtatagtggctctaccccc

SEQ ID NO: 330 - DNA, 25 bp, Homo sapiens
tggatcggggctattcctatgacct

SEQ ID NO: 331 - DNA, 25 bp, Homo sapiens
agtgcctggatcattactagtgcca

SEQ ID NO: 332 - DNA, 25 bp, Homo sapiens
agttggagtaggagactttcacaag

SEQ ID NO: 333 - DNA, 25 bp, Homo sapiens
atcattactagtgccataaccctgc

SEQ ID NO: 334 - DNA, 25 bp, Homo sapiens
caaacactcatactgggttccacaa

SEQ ID NO: 335 - DNA, 25 bp, Homo sapiens
gaatacctatggttagggcttctga

SEQ ID NO: 336 - DNA, 25 bp, Homo sapiens
gagttcagatgatcacaaacaggtg

SEQ ID NO: 337 - DNA, 25 bp, Homo sapiens
gggttccacaatccactgttagaat

SEQ ID NO: 338 - DNA, 25 bp, Homo sapiens
gtctctcacagcatctagcagtatt

SEQ ID NO: 339 - DNA, 25 bp, Homo sapiens
tagggagctattcatgtttcacttg

SEQ ID NO: 340 - DNA, 25 bp, Homo sapiens
tcatgtttcacttgctttgtggaga

SEQ ID NO: 341 - DNA, 25 bp, Homo sapiens
ttgtaacatgtctcaaacactcata

SEQ ID NO: 342 - DNA, 25 bp, Homo sapiens
ataatgtgtttagccctttcttgtt

SEQ ID NO: 343 - DNA, 25 bp, Homo sapiens
atgtttagatgctttccaatctttt

SEQ ID NO: 344 - DNA, 25 bp, Homo sapiens
cctcaccttgtttcggactatagag

SEQ ID NO: 345 - DNA, 25 bp, Homo sapiens
gaagatttcttgggaccttgtggtt

SEQ ID NO: 346 - DNA, 25 bp, Homo sapiens
gatgtgtcctcattaattttcctca

SEQ ID NO: 347 - DNA, 25 bp, Homo sapiens
gccctttcttgttgctgtatgttta

SEQ ID NO: 348 - DNA, 25 bp, Homo sapiens
ggaactgcctctacttaatcattct

SEQ ID NO: 349 - DNA, 25 bp, Homo sapiens
tatgcccattgtcctgatctgaaaa

SEQ ID NO: 350 - DNA, 25 bp, Homo sapiens
tcaggatgataacaccctatgccca

SEQ ID NO: 351 - DNA, 25 bp, Homo sapiens
aaacgccagcacaaattcaaccagt

SEQ ID NO: 352 - DNA, 25 bp, Homo sapiens
aaccagtgtcacatcatctacagcc

SEQ ID NO: 353 - DNA, 25 bp, Homo sapiens
aatccttcgagccaattcaagccag

SEQ ID NO: 354 - DNA, 25 bp, Homo sapiens
accagtccaggttccagtaactttg

SEQ ID NO: 355 - DNA, 25 bp, Homo sapiens
cctttacctacacaccagaaccagg

SEQ ID NO: 356 - DNA, 25 bp, Homo sapiens
gagagagtatgctctgtgtcgtccc

SEQ ID NO: 357 - DNA, 25 bp, Homo sapiens
gagggaagttacacaaacgccagca

SEQ ID NO: 358 - DNA, 25 bp, Homo sapiens
gtgccccctaacgaatcaaacacaa

SEQ ID NO: 359 - DNA, 25 bp, Homo sapiens
tatcctaactaccgtctttttgcta

SEQ ID NO: 360 - DNA, 25 bp, Homo sapiens
tcgtcccagacatttctgcattccg

SEQ ID NO: 361 - DNA, 25 bp, Homo sapiens
ttgtctccctgcaagtgctgatttg

SEQ ID NO: 362 - DNA, 25 bp, Homo sapiens
aagtgtgcagaatactggccgtcaa

SEQ ID NO: 363 - DNA, 25 bp, Homo sapiens
agggcactcgggcttttggagatgt

SEQ ID NO: 364 - DNA, 25 bp, Homo sapiens
atgttgacattcttccttatgatta

SEQ ID NO: 365 - DNA, 25 bp, Homo sapiens
gaagctcgaaagccctttaaccaga

SEQ ID NO: 366 - DNA, 25 bp, Homo sapiens
gattataaccgtgttgaactctctg

SEQ ID NO: 367 - DNA, 25 bp, Homo sapiens
gccacagttattgtcatggtcactc

SEQ ID NO: 368 - DNA, 25 bp, Homo sapiens
ggagccaatccatgcagatattttg

SEQ ID NO: 369 - DNA, 25 bp, Homo sapiens
ggccgtcaatggaagagggcactcg

SEQ ID NO: 370 - DNA, 25 bp, Homo sapiens
gggtcaaactacataaatgccagct

SEQ ID NO: 371 - DNA, 25 bp, Homo sapiens
tacattgctgcacaaggtcccaggg

SEQ ID NO: 372 - DNA, 25 bp, Homo sapiens
tggctgaatttcagagcatcccgcg

SEQ ID NO: 373 - DNA, 25 bp, Homo sapiens
accaccggagttcaatgcgagttct

SEQ ID NO: 374 - DNA, 25 bp, Homo sapiens
atgtcacagatctaagcagcaggga

SEQ ID NO: 375 - DNA, 25 bp, Homo sapiens
caaatgccgaagagctcagacaccc

SEQ ID NO: 376 - DNA, 25 bp, Homo sapiens
catttcctctccattgacaaaatcc

SEQ ID NO: 377 - DNA, 25 bp, Homo sapiens
ctggattggacaattcacggccctt

SEQ ID NO: 378 - DNA, 25 bp, Homo sapiens
gccatcctcatctctagaagtaagc

SEQ ID NO: 379 - DNA, 25 bp, Homo sapiens
gcgagttcttggggatgttgtcagg

SEQ ID NO: 380 - DNA, 25 bp, Homo sapiens
gcgatgcagaaatgaaccaccggag

SEQ ID NO: 381 - DNA, 25 bp, Homo sapiens
gggttgactctttggtgtcactttc

SEQ ID NO: 382 - DNA, 25 bp, Homo sapiens
ggtgtcggaaacaagccatcctcat

SEQ ID NO: 383 - DNA, 25 bp, Homo sapiens
ttactgtacatcagccatttcctct

SEQ ID NO: 384 - DNA, 25 bp, Homo sapiens
aaatagctactggcccagctaccat

SEQ ID NO: 385 - DNA, 25 bp, Homo sapiens
ctaccatttaccatttgcctacaga

SEQ ID NO: 386 - DNA, 25 bp, Homo sapiens
ctctgttccctctgctgagataaag

SEQ ID NO: 387 - DNA, 25 bp, Homo sapiens
gcaaaaggtgccttacacactgccc

SEQ ID NO: 388 - DNA, 25 bp, Homo sapiens
ggaaacctctcagtgtcttgacatc

SEQ ID NO: 389 - DNA, 25 bp, Homo sapiens
ggcattctctctggcgatggagtgt

SEQ ID NO: 390 - DNA, 25 bp, Homo sapiens
ggctgggctgaccgcaaaaggtgcc

SEQ ID NO: 391 - DNA, 25 bp, Homo sapiens
taatccacccatgcaaatagctact

SEQ ID NO: 392 - DNA, 25 bp, Homo sapiens
ttaccccccatgttgcatatcaggg

SEQ ID NO: 393 - DNA, 25 bp, Homo sapiens
ttagccaagatattcctctgttccc

SEQ ID NO: 394 - DNA, 25 bp, Homo sapiens
ttcagtctacactttggcattctct

SEQ ID NO: 395 - DNA, 25 bp, Homo sapiens
agctggctgccatgattgtttccat

SEQ ID NO: 396 - DNA, 25 bp, Homo sapiens
ctacaataagtccacttctgcctct

SEQ ID NO: 397 - DNA, 25 bp, Homo sapiens
gagggttgcttcaatcagcttttgt

SEQ ID NO: 398 - DNA, 25 bp, Homo sapiens
gattttgaggactcaccctacttca

SEQ ID NO: 399 - DNA, 25 bp, Homo sapiens
gcacttcctgacgttgctggtagtg

SEQ ID NO: 400 - DNA, 25 bp, Homo sapiens
gccagaatggacctggcctttctgc

SEQ ID NO: 401 - DNA, 25 bp, Homo sapiens
gtggcagctggaattgggggcctcg

SEQ ID NO: 402 - DNA, 25 bp, Homo sapiens
tacaccacaatggctgagcacttcc

SEQ ID NO: 403 - DNA, 25 bp, Homo sapiens
tgctggtagtgcctgccatcaagaa

SEQ ID NO: 404 - DNA, 25 bp, Homo sapiens
tgctgtggcttcaccaactatacgg

SEQ ID NO: 405 - DNA, 25 bp, Homo sapiens
ttctgctcccagacttgggggctag

SEQ ID NO: 406 - DNA, 25 bp, Homo sapiens
aactaatgccgacgtgatgaccgcc

SEQ ID NO: 407 - DNA, 25 bp, Homo sapiens
aagggcagtttgctggatttcctga

SEQ ID NO: 408 - DNA, 25 bp, Homo sapiens
actgcccagatgagctctatgacat

SEQ ID NO: 409 - DNA, 25 bp, Homo sapiens
caggatgccccgtgtggagaactgc

SEQ ID NO: 410 - DNA, 25 bp, Homo sapiens
ctcattgacttttctgctcagattg

SEQ ID NO: 411 - DNA, 25 bp, Homo sapiens
ctgtcccagggctacaggatgcccc

SEQ ID NO: 412 - DNA, 25 bp, Homo sapiens
gaccaacgtttgactacttacagag

SEQ ID NO: 413 - DNA, 25 bp, Homo sapiens
gagcagctaatgttctggtctccga

SEQ ID NO: 414 - DNA, 25 bp, Homo sapiens
gcgtcctggatgatttctacacagc

SEQ ID NO: 415 - DNA, 25 bp, Homo sapiens
gtcctttggaatcctcctatacgaa

SEQ ID NO: 416 - DNA, 25 bp, Homo sapiens
gttccctattaagtggacggctcca

SEQ ID NO: 417 - DNA, 25 bp, Homo sapiens
aatgcaggagcctacttctagctgt

SEQ ID NO: 418 - DNA, 25 bp, Homo sapiens
agagggtgcagtccagacagcttga

SEQ ID NO: 419 - DNA, 25 bp, Homo sapiens
agtaagctctgaccaagccgagatg

SEQ ID NO: 420 - DNA, 25 bp, Homo sapiens
agtccctggagaaggcatgttcccc

SEQ ID NO: 421 - DNA, 25 bp, Homo sapiens
atatcagtcactgttcgtcactcaa

SEQ ID NO: 422 - DNA, 25 bp, Homo sapiens
ccgagatgcccattctcttagtgat

SEQ ID NO: 423 - DNA, 25 bp, Homo sapiens
gacctgtggtaagcaacctgggcat

SEQ ID NO: 424 - DNA, 25 bp, Homo sapiens
gagaatcccacattagcttgttagt

SEQ ID NO: 425 - DNA, 25 bp, Homo sapiens
gatggcggcgttagggtttgagaga

SEQ ID NO: 426 - DNA, 25 bp, Homo sapiens
ggcatgttccccagaaaggtctctg

SEQ ID NO: 427 - DNA, 25 bp, Homo sapiens
gggcatcttaggaagcagtccctgg

SEQ ID NO: 428 - DNA, 25 bp, Homo sapiens
aatgtttcacagcgatctcagatct

SEQ ID NO: 429 - DNA, 25 bp, Homo sapiens
aattttggttcagccttgacgcgtt

SEQ ID NO: 430 - DNA, 25 bp, Homo sapiens
agctatctgtcttttagtgccacaa

SEQ ID NO: 431 - DNA, 25 bp, Homo sapiens
cagggatgttggatgcccacctgtc

SEQ ID NO: 432 - DNA, 25 bp, Homo sapiens
gagctaccagccaattgctcttcat

SEQ ID NO: 433 - DNA, 25 bp, Homo sapiens
gccattccccaggctatgaagtgac

SEQ ID NO: 434 - DNA, 25 bp, Homo sapiens
gcctgtgtacggagcctgatgactt

SEQ ID NO: 435 - DNA, 25 bp, Homo sapiens
tcactgggagccttctggaatcctg

SEQ ID NO: 436 - DNA, 25 bp, Homo sapiens
tggaagctgttctgcattcactgat

SEQ ID NO: 437 - DNA, 25 bp, Homo sapiens
ttgacgcgtttgtccaacagctcat

SEQ ID NO: 438 - DNA, 25 bp, Homo sapiens
ttggctccctttgtatgatatcgtg

SEQ ID NO: 439 - DNA, 25 bp, Homo sapiens
accaaggagctggtcagacggccct

SEQ ID NO: 440 - DNA, 25 bp, Homo sapiens
ctactcgggcgctcccagaaggagc

SEQ ID NO: 441 - DNA, 25 bp, Homo sapiens
ctgctcccaggacggtcttatttat

SEQ ID NO: 442 - DNA, 25 bp, Homo sapiens
cttacccacaaaccattactacttg

SEQ ID NO: 443 - DNA, 25 bp, Homo sapiens
gagaagcagtttgacggaccttgtg

SEQ ID NO: 444 - DNA, 25 bp, Homo sapiens
gatacatgttcttagtctggtccca

SEQ ID NO: 445 - DNA, 25 bp, Homo sapiens
ggaccttgtgatttgtactgtttgc

SEQ ID NO: 446 - DNA, 25 bp, Homo sapiens
ggacggtcttatttataaaccagat

SEQ ID NO: 447 - DNA, 25 bp, Homo sapiens
gtactgtttgctgcggagctattta

SEQ ID NO: 448 - DNA, 25 bp, Homo sapiens
tctaatcctacatgttgagcttatg

SEQ ID NO: 449 - DNA, 25 bp, Homo sapiens
ttagtctggtcccagaccaaggagc

SEQ ID NO: 450 - DNA, 25 bp, Homo sapiens
cagagtactgttgctgtccacagcc

SEQ ID NO: 451 - DNA, 25 bp, Homo sapiens
cagtcttcttcataccttgatgatt

SEQ ID NO: 452 - DNA, 25 bp, Homo sapiens
gaagaatcctctagacagtcctgta

SEQ ID NO: 453 - DNA, 25 bp, Homo sapiens
gagtgtacctggaatgtctactgga

SEQ ID NO: 454 - DNA, 25 bp, Homo sapiens
ggagaagcatcatttttaccttgta

SEQ ID NO: 455 - DNA, 25 bp, Homo sapiens
ggagctagaggctaccaggcaaaac

SEQ ID NO: 456 - DNA, 25 bp, Homo sapiens
ggatttcgatgccctatgtgacaat

SEQ ID NO: 457 - DNA, 25 bp, Homo sapiens
taaggagttgtttccaccaagtcct

SEQ ID NO: 458 - DNA, 25 bp, Homo sapiens
tcagtgacatccagtggaccctcta

SEQ ID NO: 459 - DNA, 25 bp, Homo sapiens
tgagccactcctcagtgatggtgca

SEQ ID NO: 460 - DNA, 25 bp, Homo sapiens
ttaccttgtagctctcaatcatcag

SEQ ID NO: 461 - DNA, 25 bp, Homo sapiens
aagtcagtgtagacctgagctggga

SEQ ID NO: 462 - DNA, 25 bp, Homo sapiens
agccctggaccttgggcctagaccg

SEQ ID NO: 463 - DNA, 25 bp, Homo sapiens
agggagtcccagagccctggacctt

SEQ ID NO: 464 - DNA, 25 bp, Homo sapiens
cacctcttccctgaagagacaggca

SEQ ID NO: 465 - DNA, 25 bp, Homo sapiens
ccagagccctggaccttgggcctag

SEQ ID NO: 466 - DNA, 25 bp, Homo sapiens
cctcaggttttcacttttcgctccg

SEQ ID NO: 467 - DNA, 25 bp, Homo sapiens
ccttgggcctagaccgcgtgataaa

SEQ ID NO: 468 - DNA, 25 bp, Homo sapiens
gaccgcgtgataaaactgggttgag

SEQ ID NO: 469 - DNA, 25 bp, Homo sapiens
gagcatctatattgtacagggctgg

SEQ ID NO: 470 - DNA, 25 bp, Homo sapiens
gcgggctccacctcaggttttcact

SEQ ID NO: 471 - DNA, 25 bp, Homo sapiens
ggaccttgggcctagaccgcgtgat

SEQ ID NO: 472 - DNA, 25 bp, Homo sapiens
tcattttacgtgagcatctatattg

SEQ ID NO: 473 - DNA, 25 bp, Homo sapiens
tcccagaatatgcaaattggtatta

SEQ ID NO: 474 - DNA, 25 bp, Homo sapiens
ttctgccttgagtccccaggggaaa

SEQ ID NO: 475 - DNA, 25 bp, Homo sapiens
ttgagggatgctggaaccagttacg

SEQ ID NO: 476 - DNA, 25 bp, Homo sapiens
tttaaggttcccagaatatgcaaat

SEQ ID NO: 477 - DNA, 25 bp, Homo sapiens
accctgagatcgaagagaagctcca

SEQ ID NO: 478 - DNA, 25 bp, Homo sapiens
agattcagcggttcatcaccctcgt

SEQ ID NO: 479 - DNA, 25 bp, Homo sapiens
agtacagtgactatttcaagccatt

SEQ ID NO: 480 - DNA, 25 bp, Homo sapiens
atgggctcctgattctcatgaaata

SEQ ID NO: 481 - DNA, 25 bp, Homo sapiens
ctctggactctgttttgtatgacaa

SEQ ID NO: 482 - DNA, 25 bp, Homo sapiens
ctgtggtgcatgagattcagcggtt

SEQ ID NO: 483 - DNA, 25 bp, Homo sapiens
gagacaccattttcagaggatacct

SEQ ID NO: 484 - DNA, 25 bp, Homo sapiens
gcacagtcgtagtgccaactctgga

SEQ ID NO: 485 - DNA, 25 bp, Homo sapiens
ggccaagccgaatccctgccatcaa

SEQ ID NO: 486 - DNA, 25 bp, Homo sapiens
tcctgattctcatgaaataccctga

SEQ ID NO: 487 - DNA, 25 bp, Homo sapiens
tcgtagtgccaactctggactctgt

SEQ ID NO: 488 - DNA, 25 bp, Homo sapiens
tgaaataccctgagatcgaagagaa

SEQ ID NO: 489 - DNA, 25 bp, Homo sapiens
tgcatgagattcagcggttcatcac

SEQ ID NO: 490 - DNA, 25 bp, Homo sapiens
tgccccatgaagcaacccgagacac

SEQ ID NO: 491 - DNA, 25 bp, Homo sapiens
tgttgtgtgccattttgcagcattt

SEQ ID NO: 492 - DNA, 25 bp, Homo sapiens
ttctcatgaaataccctgagatcga

SEQ ID NO: 493 - DNA, 25 bp, Homo sapiens
agttgtgtgcatgtatcggttccta

SEQ ID NO: 494 - DNA, 25 bp, Homo sapiens
atgtacatcgtgaccttcatgaaga

SEQ ID NO: 495 - DNA, 25 bp, Homo sapiens
atgtttcagtccagtgcacatcagc

SEQ ID NO: 496 - DNA, 25 bp, Homo sapiens
gaagagcatcctaccatttgaagca

SEQ ID NO: 497 - DNA, 25 bp, Homo sapiens
gattactgtgtgaagcaggccatga

SEQ ID NO: 498 - DNA, 25 bp, Homo sapiens
gattgttcagtactgccggagttga

SEQ ID NO: 499 - DNA, 25 bp, Homo sapiens
ggagttgaggattactgtgccagta

SEQ ID NO: 500 - DNA, 25 bp, Homo sapiens
tggcatgttcagaggctgccgaatc

SEQ ID NO: 501 - DNA, 25 bp, Homo sapiens
tgtatgtacccctttattgctcaaa

SEQ ID NO: 502 - DNA, 25 bp, Homo sapiens
ttatcttgtagacactggcatgttc

SEQ ID NO: 503 - DNA, 25 bp, Homo sapiens
ttctgccacctctgaagcctgatta

SEQ ID NO: 504 - DNA, 25 bp, Homo sapiens
aaccatctcctaaaattcagcattt

SEQ ID NO: 505 - DNA, 25 bp, Homo sapiens
actgttacatacattttccatggta

SEQ ID NO: 506 - DNA, 25 bp, Homo sapiens
agttacccagctgtttaatattcca

SEQ ID NO: 507 - DNA, 25 bp, Homo sapiens
atctttcaactgtttagttacccag

SEQ ID NO: 508 - DNA, 25 bp, Homo sapiens
gaaaggaagttcagtcagtcctgtg

SEQ ID NO: 509 - DNA, 25 bp, Homo sapiens
ggaaatatattccacactgttacat

SEQ ID NO: 510 - DNA, 25 bp, Homo sapiens
gtaggacattattgccatattgtat

SEQ ID NO: 511 - DNA, 25 bp, Homo sapiens
gtattttcagtatcactggatccct

SEQ ID NO: 512 - DNA, 25 bp, Homo sapiens
gtcctgtggaatgaaaccatctcct

SEQ ID NO: 513 - DNA, 25 bp, Homo sapiens
tcagtcttcaccgttttataaacgt

SEQ ID NO: 514 - DNA, 25 bp, Homo sapiens
tttgcagcattctaaaagcctgtgt

SEQ ID NO: 515 - DNA, 25 bp, Homo sapiens
aaggcaagccttgatggacgccatc

SEQ ID NO: 516 - DNA, 25 bp, Homo sapiens
aggcgtcactcaaggagtctgcata

SEQ ID NO: 517 - DNA, 25 bp, Homo sapiens
gaaacccacctgtaatatgcccaca

SEQ ID NO: 518 - DNA, 25 bp, Homo sapiens
gctgcgagactgagaaaggtgccct

SEQ ID NO: 519 - DNA, 25 bp, Homo sapiens
ggccagagaattgcagaaacccacc

SEQ ID NO: 520 - DNA, 25 bp, Homo sapiens
gtctgcatagccaggaacatcaagt

SEQ ID NO: 521 - DNA, 25 bp, Homo sapiens
gtgtgttcctgtataacggcttgaa

SEQ ID NO: 522 - DNA, 25 bp, Homo sapiens
gtgttactttcttgtctacaggcca

SEQ ID NO: 523 - DNA, 25 bp, Homo sapiens
taatatgcccacaggcgtcactcaa

SEQ ID NO: 524 - DNA, 25 bp, Homo sapiens
tgcgcacagttgattttcggtgtgt

SEQ ID NO: 525 - DNA, 25 bp, Homo sapiens
tgcgcagctcgtgtgccaaggaaat

SEQ ID NO: 526 - DNA, 25 bp, Homo sapiens
aaagtgaaacttgggtatcctcaat

SEQ ID NO: 527 - DNA, 25 bp, Homo sapiens
aaatgtcctgggagtgcatccaaag

SEQ ID NO: 528 - DNA, 25 bp, Homo sapiens
ataaatgtcagaatcgcataacccc

SEQ ID NO: 529 - DNA, 25 bp, Homo sapiens
gaagccactccagtgaccataagat

SEQ ID NO: 530 - DNA, 25 bp, Homo sapiens
gagaatgactgggtcttggctcttt

SEQ ID NO: 531 - DNA, 25 bp, Homo sapiens
tatcctcaatactaagaaatctctg

SEQ ID NO: 532 - DNA, 25 bp, Homo sapiens
tcctgatccaagcagaaccctgtta

SEQ ID NO: 533 - DNA, 25 bp, Homo sapiens
tgaaccgcatcaaagacttccagaa

SEQ ID NO: 534 - DNA, 25 bp, Homo sapiens
tgatcttacctctactcctctgaaa

SEQ ID NO: 535 - DNA, 25 bp, Homo sapiens
ttggctctttgatcttacctctact

SEQ ID NO: 536 - DNA, 25 bp, Homo sapiens
ttgtgttaggtggatgaaccgcatc

SEQ ID NO: 537 - DNA, 25 bp, Homo sapiens
aacgacaaacattgtggctcctcca

SEQ ID NO: 538 - DNA, 25 bp, Homo sapiens
aagtgattgcaaacaggctggattt

SEQ ID NO: 539 - DNA, 25 bp, Homo sapiens
accaccttcaaacccaggacagttg

SEQ ID NO: 540 - DNA, 25 bp, Homo sapiens
acccaggacagttggtggaaccaat

SEQ ID NO: 541 - DNA, 25 bp, Homo sapiens
agggttcagtagtatacttcatgtt

SEQ ID NO: 542 - DNA, 25 bp, Homo sapiens
attgcaacctcagctgatacaacca

SEQ ID NO: 543 - DNA, 25 bp, Homo sapiens
cattcagcagtgtcagtttttcttt

SEQ ID NO: 544 - DNA, 25 bp, Homo sapiens
cattttctctttgaactagatggta

SEQ ID NO: 545 - DNA, 25 bp, Homo sapiens
gacatgcatgtttcagggttcagta

SEQ ID NO: 546 - DNA, 25 bp, Homo sapiens
ggaaccaatggtgccacttcagttg

SEQ ID NO: 547 - DNA, 25 bp, Homo sapiens
tttctgtctactactaagattcatc

SEQ ID NO: 548 - DNA, 25 bp, Homo sapiens
agatggcacaggctctgccgtgtcc

SEQ ID NO: 549 - DNA, 25 bp, Homo sapiens
aggacctcttggtggactctggaaa

SEQ ID NO: 550 - DNA, 25 bp, Homo sapiens
agtttgcaaacatcgtgccctttga

SEQ ID NO: 551 - DNA, 25 bp, Homo sapiens
caaaactggacggaacgcctcgatc

SEQ ID NO: 552 - DNA, 25 bp, Homo sapiens
cagaggtttcctcttaggtgttagg

SEQ ID NO: 553 - DNA, 25 bp, Homo sapiens
gaccaacatcgtgaaatgccgtctt

SEQ ID NO: 554 - DNA, 25 bp, Homo sapiens
gagactctgatgctgttctttgaca

SEQ ID NO: 555 - DNA, 25 bp, Homo sapiens
gggatgccttgtatgcaatgctgat

SEQ ID NO: 556 - DNA, 25 bp, Homo sapiens
gtcagagctggtacagcaggcccag

SEQ ID NO: 557 - DNA, 25 bp, Homo sapiens
gttccagcaaatggtgctgacccca

SEQ ID NO: 558 - DNA, 25 bp, Homo sapiens
tcctgggaccagctcatgaggcagc

SEQ ID NO: 559 - DNA, 25 bp, Homo sapiens
agcagaaatgtctctcctctaggta

SEQ ID NO: 560 - DNA, 25 bp, Homo sapiens
ctaggtatcgtattttgttgctcaa

SEQ ID NO: 561 - DNA, 25 bp, Homo sapiens
ctggagttctctttattttccacca

SEQ ID NO: 562 - DNA, 25 bp, Homo sapiens
gaagcctcagagattacacagttag

SEQ ID NO: 563 - DNA, 25 bp, Homo sapiens
gacttctgagctataacttgtggga

SEQ ID NO: 564 - DNA, 25 bp, Homo sapiens
gatatattgggttcacattctggag

SEQ ID NO: 565 - DNA, 25 bp, Homo sapiens
taaggctcccaacaatgctatacag

SEQ ID NO: 566 - DNA, 25 bp, Homo sapiens
taccagcttgcaatgggtcagcact

SEQ ID NO: 567 - DNA, 25 bp, Homo sapiens
tagaatccataatgctccctacatc

SEQ ID NO: 568 - DNA, 25 bp, Homo sapiens
tatacagcgcagttgtttccattcc

SEQ ID NO: 569 - DNA, 25 bp, Homo sapiens
ttaaggtccgttgtgccagcagaaa

SEQ ID NO: 570 - DNA, 25 bp, Homo sapiens
aagcattgcacctttaagaagaaaa

SEQ ID NO: 571 - DNA, 25 bp, Homo sapiens
acgcatgatggcctatggttttaaa

SEQ ID NO: 572 - DNA, 25 bp, Homo sapiens
agctatacttgtgatgtctgacgca

SEQ ID NO: 573 - DNA, 25 bp, Homo sapiens
caaatatgacagtatggtagctata

SEQ ID NO: 574 - DNA, 25 bp, Homo sapiens
gacaagggtgctgtatctttgatta

SEQ ID NO: 575 - DNA, 25 bp, Homo sapiens
gatgtctgacgcatgatggcctatg

SEQ ID NO: 576 - DNA, 25 bp, Homo sapiens
gattgttgaagcatttatcttgttg

SEQ ID NO: 577 - DNA, 25 bp, Homo sapiens
gcagcactttttcagaatatacaga

SEQ ID NO: 578 - DNA, 25 bp, Homo sapiens
gcatttatcttgttgatttcttaca

SEQ ID NO: 579 - DNA, 25 bp, Homo sapiens
ggacgatgtcagtcaagcagcactt

SEQ ID NO: 580 - DNA, 25 bp, Homo sapiens
gtcagtcaagcagcactttttcaga

SEQ ID NO: 581 - DNA, 25 bp, Homo sapiens
aaagagctgccttgcccttctgcaa

SEQ ID NO: 582 - DNA, 25 bp, Homo sapiens
aaatgatgctgggtcctttctacct

SEQ ID NO: 583 - DNA, 25 bp, Homo sapiens
aagatgtgtcaaggccataccctga

SEQ ID NO: 584 - DNA, 25 bp, Homo sapiens
atgggaggccaagtgtccaggctcc

SEQ ID NO: 585 - DNA, 25 bp, Homo sapiens
ctaatgctcatgaatggacccctca

SEQ ID NO: 586 - DNA, 25 bp, Homo sapiens
gaagagaaactggtcctcaccagat

SEQ ID NO: 587 - DNA, 25 bp, Homo sapiens
gtcacaaaaagtccagaccccaggg

SEQ ID NO: 588 - DNA, 25 bp, Homo sapiens
gtggcttcaagtgtgtgattcctgt

SEQ ID NO: 589 - DNA, 25 bp, Homo sapiens
gttgttacctgcactgtggcttcaa

SEQ ID NO: 590 - DNA, 25 bp, Homo sapiens
tcctctaccaggtgtcctcagaaat

SEQ ID NO: 591 - DNA, 25 bp, Homo sapiens
tgagcttgaagtccttttccccaaa

SEQ ID NO: 592 - DNA, 25 bp, Homo sapiens
agatttctggccctaggccacgaag

SEQ ID NO: 593 - DNA, 25 bp, Homo sapiens
aggctctgggagatttctggcccta

SEQ ID NO: 594 - DNA, 25 bp, Homo sapiens
ctaaagacacggaggctctgggaga

SEQ ID NO: 595 - DNA, 25 bp, Homo sapiens
ctaggccacgaaggcccacttggga

SEQ ID NO: 596 - DNA, 25 bp, Homo sapiens
ctgaggtcctgtgattccatttggg

SEQ ID NO: 597 - DNA, 25 bp, Homo sapiens
ctgggagatttctggccctaggcca

SEQ ID NO: 598 - DNA, 25 bp, Homo sapiens
cttgggactcaagctgaggtcctgt

SEQ ID NO: 599 - DNA, 25 bp, Homo sapiens
gaaggcccacttgggactcaagctg

SEQ ID NO: 600 - DNA, 25 bp, Homo sapiens
gcactgttccactggcacctaaaga

SEQ ID NO: 601 - DNA, 25 bp, Homo sapiens
gcccacttgggactcaagctgaggt

SEQ ID NO: 602 - DNA, 25 bp, Homo sapiens
tggcacctaaagacacggaggctct

SEQ ID NO: 603 - DNA, 25 bp, Homo sapiens
acttgccacactgagtgtctgggtc

SEQ ID NO: 604 - DNA, 25 bp, Homo sapiens
agaccgtcagttagcccagcttctg

SEQ ID NO: 605 - DNA, 25 bp, Homo sapiens
ccacactgagtgtctgggtccaagg

SEQ ID NO: 606 - DNA, 25 bp, Homo sapiens
cggcctttgatgattacccgctggg

SEQ ID NO: 607 - DNA, 25 bp, Homo sapiens
cttctgggataacgcgtctcatcga

SEQ ID NO: 608 - DNA, 25 bp, Homo sapiens
gaacttgccacactgagtgtctggg

SEQ ID NO: 609 - DNA, 25 bp, Homo sapiens
gaccgtcagttagcccagcttctgg

SEQ ID NO: 610 - DNA, 25 bp, Homo sapiens
gccacactgagtgtctgggtccaag

SEQ ID NO: 611 - DNA, 25 bp, Homo sapiens
ggataacgcgtctcatcgaactgga

SEQ ID NO: 612 - DNA, 25 bp, Homo sapiens
tggaacttgccacactgagtgtctg

SEQ ID NO: 613 - DNA, 25 bp, Homo sapiens
tgggataacgcgtctcatcgaactg

SEQ ID NO: 614 - DNA, 25 bp, Homo sapiens
aaataccataacatcacccagactg

SEQ ID NO: 615 - DNA, 25 bp, Homo sapiens
aacatccaatgtggtgcttgttttg

SEQ ID NO: 616 - DNA, 25 bp, Homo sapiens
aagtgctcaattacctgtggcaaag

SEQ ID NO: 617 - DNA, 25 bp, Homo sapiens
agatcagtggccagtgtactgccga

SEQ ID NO: 618 - DNA, 25 bp, Homo sapiens
agctgcagcagaagagttgacctct

SEQ ID NO: 619 - DNA, 25 bp, Homo sapiens
agggacttctatgcccaaaagctgc

SEQ ID NO: 620 - DNA, 25 bp, Homo sapiens
ctagcaggctggctggatcacagct

SEQ ID NO: 621 - DNA, 25 bp, Homo sapiens
gactggctgctctgactttcaagtg

SEQ ID NO: 622 - DNA, 25 bp, Homo sapiens
gggtgactggtctaagtgctcaatt

SEQ ID NO: 623 - DNA, 25 bp, Homo sapiens
gtggtatcagcgctgctgtgaaaca

SEQ ID NO: 624 - DNA, 25 bp, Homo sapiens
gtgtactgccgagtgatacgtgaaa

SEQ ID NO: 625 - DNA, 25 bp, Homo sapiens
aaagaatatgctgttggccaccaag

SEQ ID NO: 626 - DNA, 25 bp, Homo sapiens
actggcgcaggaccggacaccgata

SEQ ID NO: 627 - DNA, 25 bp, Homo sapiens
agcagcaaatgtcacgttactcacc

SEQ ID NO: 628 - DNA, 25 bp, Homo sapiens
agtgacctgcactcccgaaagaata

SEQ ID NO: 629 - DNA, 25 bp, Homo sapiens
gaagctgttcacttagctagggatt

SEQ ID NO: 630 - DNA, 25 bp, Homo sapiens
gaatttacggatctactggcgcagg

SEQ ID NO: 631 - DNA, 25 bp, Homo sapiens
gccaaagccgtctctgagtatttga

SEQ ID NO: 632 - DNA, 25 bp, Homo sapiens
tcggtttgaatttacccgcgggcag

SEQ ID NO: 633 - DNA, 25 bp, Homo sapiens
tgagtatttgaaccggcagcacaca

SEQ ID NO: 634 - DNA, 25 bp, Homo sapiens
tgcgaaacggagtttcccgccaaag

SEQ ID NO: 635 - DNA, 25 bp, Homo sapiens
ttggccaccaagcaactttgtaaag

SEQ ID NO: 636 - DNA, 25 bp, Homo sapiens
aactcacatgagctcgtgtttggct

SEQ ID NO: 637 - DNA, 25 bp, Homo sapiens
agggctccgccatataggcatgtgt

SEQ ID NO: 638 - DNA, 25 bp, Homo sapiens
aggtataccttgctgatgctgcaca

SEQ ID NO: 639 - DNA, 25 bp, Homo sapiens
aggtgactgagagcctcactgtcaa

SEQ ID NO: 640 - DNA, 25 bp, Homo sapiens
agtggccttagacataactgctgcc

SEQ ID NO: 641 - DNA, 25 bp, Homo sapiens
gcacacaaccttgctcgttatgtaa

SEQ ID NO: 642 - DNA, 25 bp, Homo sapiens
gggccctaatagtcataagtatcat

SEQ ID NO: 643 - DNA, 25 bp, Homo sapiens
gtgagcatccctaggttctggcgta

SEQ ID NO: 644 - DNA, 25 bp, Homo sapiens
gttatgtaaccacaccacatgaggc

SEQ ID NO: 645 - DNA, 25 bp, Homo sapiens
ttctggcgtacattgggccctaata

SEQ ID NO: 646 - DNA, 25 bp, Homo sapiens
ttgtgggttatggactcagggctcc

SEQ ID NO: 647 - DNA, 25 bp, Homo sapiens
aaatcctgtcaataatctctggttt

SEQ ID NO: 648 - DNA, 25 bp, Homo sapiens
aaatgatgatttattgctgccttcc

SEQ ID NO: 649 - DNA, 25 bp, Homo sapiens
aacttaagctttctctgggatctct

SEQ ID NO: 650 - DNA, 25 bp, Homo sapiens
aagacagctcagagtcaacttttac

SEQ ID NO: 651 - DNA, 25 bp, Homo sapiens
aggtaaaacttcatctctggtaaat

SEQ ID NO: 652 - DNA, 25 bp, Homo sapiens
atgggactctagagtgtgctcttaa

SEQ ID NO: 653 - DNA, 25 bp, Homo sapiens
gaagtttcctctttttaattcagtg

SEQ ID NO: 654 - DNA, 25 bp, Homo sapiens
gtagaactaggacttgaacccaaga

SEQ ID NO: 655 - DNA, 25 bp, Homo sapiens
tatgcacataatgttccacgcacct

SEQ ID NO: 656 - DNA, 25 bp, Homo sapiens
tccacgcacctagttgttcaaacaa

SEQ ID NO: 657 - DNA, 25 bp, Homo sapiens
ttttcccttaaccttgcatttcaat

SEQ ID NO: 658 - DNA, 25 bp, Homo sapiens
agacatcattccaattgtagctggt

SEQ ID NO: 659 - DNA, 25 bp, Homo sapiens
atgcacacaggaatgttcctatttt

SEQ ID NO: 660 - DNA, 25 bp, Homo sapiens
attccaattgtagctggtgtggttg

SEQ ID NO: 661 - DNA, 25 bp, Homo sapiens
gaacaacgaggtcatggttcatgtt

SEQ ID NO: 662 - DNA, 25 bp, Homo sapiens
gaatgtgttcagtgcagagccttca

SEQ ID NO: 663 - DNA, 25 bp, Homo sapiens
gagaatccagagtgtcccactggtc

SEQ ID NO: 664 - DNA, 25 bp, Homo sapiens
ggttctattttacgtattcagtgaa

SEQ ID NO: 665 - DNA, 25 bp, Homo sapiens
gtgtcccactggtccagacatcatt

SEQ ID NO: 666 - DNA, 25 bp, Homo sapiens
gttcagtgcagagccttcaataaag

SEQ ID NO: 667 - DNA, 25 bp, Homo sapiens
tgtgctgagcataaagaatgtgttc

SEQ ID NO: 668 - DNA, 25 bp, Homo sapiens
ttcagtgaatgggaacaacgaggtc

SEQ ID NO: 669 - DNA, 25 bp, Homo sapiens
aaggtactcttcgatggcggccagt

SEQ ID NO: 670 - DNA, 25 bp, Homo sapiens
agtcaaccacttctggtgccaggag

SEQ ID NO: 671 - DNA, 25 bp, Homo sapiens
cctgaccgtcggaaacaaggcagat

SEQ ID NO: 672 - DNA, 25 bp, Homo sapiens
cgttgcaatcgcctttgcagtcaac

SEQ ID NO: 673 - DNA, 25 bp, Homo sapiens
ctgccagctgtcagcaaggcctggg

SEQ ID NO: 674 - DNA, 25 bp, Homo sapiens
gaatgcctatgagaatgtgcccgag

SEQ ID NO: 675 - DNA, 25 bp, Homo sapiens
gaggaaggcaaggtccgcagcaccc

SEQ ID NO: 676 - DNA, 25 bp, Homo sapiens
ggccagtttcaggtccagtgagcat

SEQ ID NO: 677 - DNA, 25 bp, Homo sapiens
gtgttcctggtcctcgttgcaatcg

SEQ ID NO: 678 - DNA, 25 bp, Homo sapiens
tgcacacatgatcctgaccgtcgga

SEQ ID NO: 679 - DNA, 25 bp, Homo sapiens
ttcagccctggatgcagggccttat

SEQ ID NO: 680 - DNA, 25 bp, Homo sapiens
aactacttaccttgcctacgatatc

SEQ ID NO: 681 - DNA, 25 bp, Homo sapiens
atgaagttcttagcagtcctggtac

SEQ ID NO: 682 - DNA, 25 bp, Homo sapiens
gaatggtagagtgtgtccctgagat

SEQ ID NO: 683 - DNA, 25 bp, Homo sapiens
gagtcttctgcaattggtcacaact

SEQ ID NO: 684 - DNA, 25 bp, Homo sapiens
gatatcccctttatctctaatcagt

SEQ ID NO: 685 - DNA, 25 bp, Homo sapiens
ggaatcagcttgagtcttctgcaat

SEQ ID NO: 686 - DNA, 25 bp, Homo sapiens
ggtcacaactattcatgcttcctgt

SEQ ID NO: 687 - DNA, 25 bp, Homo sapiens
gtatccagctactggtcctgctgat

SEQ ID NO: 688 - DNA, 25 bp, Homo sapiens
tagcagtcctggtactcttgggagt

SEQ ID NO: 689 - DNA, 25 bp, Homo sapiens
tgcttctaccactgctcgtaaagac

SEQ ID NO: 690 - DNA, 25 bp, Homo sapiens
ttgccttctcttaggctttgaagca

SEQ ID NO: 691 - DNA, 25 bp, Homo sapiens
aaggcatatacttccttatgagatt

SEQ ID NO: 692 - DNA, 25 bp, Homo sapiens
aattctaacatagtctagttgtcaa

SEQ ID NO: 693 - DNA, 25 bp, Homo sapiens
accggtagcttgtgatcaaaggcat

SEQ ID NO: 694 - DNA, 25 bp, Homo sapiens
aggattaagacaatcactgatagct

SEQ ID NO: 695 - DNA, 25 bp, Homo sapiens
atacttccttatgagatttctttac

SEQ ID NO: 696 - DNA, 25 bp, Homo sapiens
cactaacgttgagtaccggtagctt

SEQ ID NO: 697 - DNA, 25 bp, Homo sapiens
gaatcctcaatagaaaatcacatta

SEQ ID NO: 698 - DNA, 25 bp, Homo sapiens
gtatgatttattctctaattctaac

SEQ ID NO: 699 - DNA, 25 bp, Homo sapiens
gttgagtaccggtagcttgtgatca

SEQ ID NO: 700 - DNA, 25 bp, Homo sapiens
gtttatggctgtatgatttattctc

SEQ ID NO: 701 - DNA, 25 bp, Homo sapiens
ttggcctttttcaacactaacgttg

SEQ ID NO: 702 - DNA, 25 bp, Homo sapiens
aagactcttggcattgggagactga

SEQ ID NO: 703 - DNA, 25 bp, Homo sapiens
aatgccttcaattttccaaggacgt

SEQ ID NO: 704 - DNA, 25 bp, Homo sapiens
atgcactgcagagactattctttat

SEQ ID NO: 705 - DNA, 25 bp, Homo sapiens
cagaagctcttgtcactgaagcaga

SEQ ID NO: 706 - DNA, 25 bp, Homo sapiens
gaaaaggccctccttcttagatgat

SEQ ID NO: 707 - DNA, 25 bp, Homo sapiens
gaaccctaatcaaggacttgctggg

SEQ ID NO: 708 - DNA, 25 bp, Homo sapiens
gcttctaaaggctactatctcacta

SEQ ID NO: 709 - DNA, 25 bp, Homo sapiens
ggtatcagtgtgagcctttcatcag

SEQ ID NO: 710 - DNA, 25 bp, Homo sapiens
tatctcactaaagccttgactggac

SEQ ID NO: 711 - DNA, 25 bp, Homo sapiens
ttgacatttggagtcgctctttgtg

SEQ ID NO: 712 - DNA, 25 bp, Homo sapiens
ttgttcagtggtttttgctcattaa

SEQ ID NO: 713 - DNA, 25 bp, Homo sapiens
agtcgatttcgtttcgcagctgtct

SEQ ID NO: 714 - DNA, 25 bp, Homo sapiens
atataactataaccacacgccgtgt

SEQ ID NO: 715 - DNA, 25 bp, Homo sapiens
gcagcagatacctcggtccagatct

SEQ ID NO: 716 - DNA, 25 bp, Homo sapiens
gctgccacacactacaggagtcaat

SEQ ID NO: 717 - DNA, 25 bp, Homo sapiens
ggaaaaccagccgaatgagatcaaa

SEQ ID NO: 718 - DNA, 25 bp, Homo sapiens
ggactcttcgaggaaaaccagccga

SEQ ID NO: 719 - DNA, 25 bp, Homo sapiens
gggacgcaggactcttcgaggaaaa

SEQ ID NO: 720 - DNA, 25 bp, Homo sapiens
gtttcgtattctgtattcagcacat

SEQ ID NO: 721 - DNA, 25 bp, Homo sapiens
tcagcacatgttatctatctatcta

SEQ ID NO: 722 - DNA, 25 bp, Homo sapiens
tggagcgccatagcacagtcgattt

SEQ ID NO: 723 - DNA, 25 bp, Homo sapiens
tttcctttctgtttcgtattctgta

SEQ ID NO: 724 - DNA, 25 bp, Homo sapiens
aagaaacttccgtctgggcattctg

SEQ ID NO: 725 - DNA, 25 bp, Homo sapiens
aggagccacttcttgatgtgctaca

SEQ ID NO: 726 - DNA, 25 bp, Homo sapiens
cagcaattgttatcctgtctccaga

SEQ ID NO: 727 - DNA, 25 bp, Homo sapiens
caggatttcagactttggaccatga

SEQ ID NO: 728 - DNA, 25 bp, Homo sapiens
ctgggcattctgacctattggaaga

SEQ ID NO: 729 - DNA, 25 bp, Homo sapiens
gaggagtatgctctgcttacagcaa

SEQ ID NO: 730 - DNA, 25 bp, Homo sapiens
gtctgcggttgaagctatgttcctt

SEQ ID NO: 731 - DNA, 25 bp, Homo sapiens
gttgtgtaagattcaccagcctgaa

SEQ ID NO: 732 - DNA, 25 bp, Homo sapiens
tatgttccttcgttcagctgagatt

SEQ ID NO: 733 - DNA, 25 bp, Homo sapiens
tgaaaatcctcaacactttgcctgt

SEQ ID NO: 734 - DNA, 25 bp, Homo sapiens
tgctttgctgaaagggtctgcggtt

SEQ ID NO: 735 - DNA, 25 bp, Homo sapiens
aacccaggagtttcaaagaagcgct

SEQ ID NO: 736 - DNA, 25 bp, Homo sapiens
atgcggctgctcctattgctgagct

SEQ ID NO: 737 - DNA, 25 bp, Homo sapiens
caggagtcctgggtgatatcatcat

SEQ ID NO: 738 - DNA, 25 bp, Homo sapiens
gaagcgctagtaaggtctctgagat

SEQ ID NO: 739 - DNA, 25 bp, Homo sapiens
gagctgcctggccaaaacaggagtc

SEQ ID NO: 740 - DNA, 25 bp, Homo sapiens
gcccttagagtcttggttgccaaac

SEQ ID NO: 741 - DNA, 25 bp, Homo sapiens
ggttgccaaacagatttgcagatca

SEQ ID NO: 742 - DNA, 25 bp, Homo sapiens
gtctctgagatccttgcactagcta

SEQ ID NO: 743 - DNA, 25 bp, Homo sapiens
tggcttccagaagcatgcggctgct

SEQ ID NO: 744 - DNA, 25 bp, Homo sapiens
ttgcactagctacatcctcagggta

SEQ ID NO: 745 - DNA, 25 bp, Homo sapiens
tttgcagatcaaggagaacccagga

SEQ ID NO: 746 - DNA, 25 bp, Homo sapiens
aagttcccctggacaagttctcttg

SEQ ID NO: 747 - DNA, 25 bp, Homo sapiens
agatgtacctttgctactcattcac

SEQ ID NO: 748 - DNA, 25 bp, Homo sapiens
ataacaggtttgcagagactggaga

SEQ ID NO: 749 - DNA, 25 bp, Homo sapiens
atcaccatgcatcaaaggtagggcc

SEQ ID NO: 750 - DNA, 25 bp, Homo sapiens
cccataccccactcatggtagtaaa

SEQ ID NO: 751 - DNA, 25 bp, Homo sapiens
gtataatgatctagtcctgtacaga

SEQ ID NO: 752 - DNA, 25 bp, Homo sapiens
gtgactaattctacttcatcaacat

SEQ ID NO: 753 - DNA, 25 bp, Homo sapiens
tataaatgaaagttcccctggacaa

SEQ ID NO: 754 - DNA, 25 bp, Homo sapiens
tggtggctaaagctaggaataactt

SEQ ID NO: 755 - DNA, 25 bp, Homo sapiens
ttgctactcattcaccttctgtcat

SEQ ID NO: 756 - DNA, 25 bp, Homo sapiens
ttgttttattaattccagtgactaa

SEQ ID NO: 757 - DNA, 25 bp, Homo sapiens
aatttctctttatatgtggtatttg

SEQ ID NO: 758 - DNA, 25 bp, Homo sapiens
cataattaagcgtgcatgtttgttt

SEQ ID NO: 759 - DNA, 25 bp, Homo sapiens
gaaatcacactcaagcattatcaag

SEQ ID NO: 760 - DNA, 25 bp, Homo sapiens
gaacatagtttagcaagtttatatt

SEQ ID NO: 761 - DNA, 25 bp, Homo sapiens
gatatcctgagccatatttctttaa

SEQ ID NO: 762 - DNA, 25 bp, Homo sapiens
gtcatgagaaatcacactcaagcat

SEQ ID NO: 763 - DNA, 25 bp, Homo sapiens
gtctcttgaagatatactggaatac

SEQ ID NO: 764 - DNA, 25 bp, Homo sapiens
gtgtgtttgattaacctattaactg

SEQ ID NO: 765 - DNA, 25 bp, Homo sapiens
gttgaaaaacacagtctcttgaaga

SEQ ID NO: 766 - DNA, 25 bp, Homo sapiens
tataagcagtttttaatgatcaatt

SEQ ID NO: 767 - DNA, 25 bp, Homo sapiens
tatatttgatatcctgagccatatt

SEQ ID NO: 768 - DNA, 25 bp, Homo sapiens
aaagccaacaaatcctccaagttag

SEQ ID NO: 769 - DNA, 25 bp, Homo sapiens
aagtttgacaccatatctgagaaaa

SEQ ID NO: 770 - DNA, 25 bp, Homo sapiens
aatgataacattttcctgtcacccc

SEQ ID NO: 771 - DNA, 25 bp, Homo sapiens
acggcttttgctatgaccaagctgg

SEQ ID NO: 772 - DNA, 25 bp, Homo sapiens
atgtctcagatgcattccataaggc

SEQ ID NO: 773 - DNA, 25 bp, Homo sapiens
ccaacagggtgactttcaaggccaa

SEQ ID NO: 774 - DNA, 25 bp, Homo sapiens
gctatgaccaagctgggtgcctgta

SEQ ID NO: 775 - DNA, 25 bp, Homo sapiens
gctttgctaccactttctatcagca

SEQ ID NO: 776 - DNA, 25 bp, Homo sapiens
taatgacaccctccagcaactgatg

SEQ ID NO: 777 - DNA, 25 bp, Homo sapiens
tgccgactctatcgaaaagccaaca

SEQ ID NO: 778 - DNA, 25 bp, Homo sapiens
ttctatcagcacctggcagattcca

SEQ ID NO: 779 - DNA, 25 bp, Homo sapiens
aaattgtttgccctgataccttgaa

SEQ ID NO: 780 - DNA, 25 bp, Homo sapiens
agaaacagacttatttcagaggctt

SEQ ID NO: 781 - DNA, 25 bp, Homo sapiens
agtcatctacttctaacaggacaga

SEQ ID NO: 782 - DNA, 25 bp, Homo sapiens
attttctctcatgtaccaaccttgt

SEQ ID NO: 783 - DNA, 25 bp, Homo sapiens
cagaggcttattgttttctctgtat

SEQ ID NO: 784 - DNA, 25 bp, Homo sapiens
caggacagatacacaactatttgag

SEQ ID NO: 785 - DNA, 25 bp, Homo sapiens
gaaattcacattctcttatagtttg

SEQ ID NO: 786 - DNA, 25 bp, Homo sapiens
gggaagactattgactatttcagaa

SEQ ID NO: 787 - DNA, 25 bp, Homo sapiens
gtaaaaggtcaacattttctctcat

SEQ ID NO: 788 - DNA, 25 bp, Homo sapiens
gtaccaaccttgtttgtatttctat

SEQ ID NO: 789 - DNA, 25 bp, Homo sapiens
gtttcgtgacatgtacacagttgct

SEQ ID NO: 790 - DNA, 25 bp, Homo sapiens
acgtattgggtgattcacttaccca

SEQ ID NO: 791 - DNA, 25 bp, Homo sapiens
atgtctttctgggatgatttcatca

SEQ ID NO: 792 - DNA, 25 bp, Homo sapiens
attcatgtctttctgggatgatttc

SEQ ID NO: 793 - DNA, 25 bp, Homo sapiens
attcattcatgtctttctgggatga

SEQ ID NO: 794 - DNA, 25 bp, Homo sapiens
cattcattcatgtctttctgggatg

SEQ ID NO: 795 - DNA, 25 bp, Homo sapiens
gtattgggtgattcacttacccact

SEQ ID NO: 796 - DNA, 25 bp, Homo sapiens
tcacttacccactcaccaactcatt

SEQ ID NO: 797 - DNA, 25 bp, Homo sapiens
tcatgtctttctgggatgatttcat

SEQ ID NO: 798 - DNA, 25 bp, Homo sapiens
tcattcatgtctttctgggatgatt

SEQ ID NO: 799 - DNA, 25 bp, Homo sapiens
tgtctttctgggatgatttcatcac

SEQ ID NO: 800 - DNA, 25 bp, Homo sapiens
ttacgtattgggtgattcacttacc

SEQ ID NO: 801 - DNA, 25 bp, Homo sapiens
aaactggagtccactgagagccgca

SEQ ID NO: 802 - DNA, 25 bp, Homo sapiens
aagcttcgagacctggaggactcac

SEQ ID NO: 803 - DNA, 25 bp, Homo sapiens
acctggaggactcactggcccgtga

SEQ ID NO: 804 - DNA, 25 bp, Homo sapiens
agatggccgagatgcgggcaaggat

SEQ ID NO: 805 - DNA, 25 bp, Homo sapiens
atggagatgacctgctccatcacca

SEQ ID NO: 806 - DNA, 25 bp, Homo sapiens
cacgcctaccgcaagctcttggagg

SEQ ID NO: 807 - DNA, 25 bp, Homo sapiens
ctggcagccaaggaggcgaagcttc

SEQ ID NO: 808 - DNA, 25 bp, Homo sapiens
gagcttctggacatcaagctggccc

SEQ ID NO: 809 - DNA, 25 bp, Homo sapiens
gcgaagcttcgagacctggaggact

SEQ ID NO: 810 - DNA, 25 bp, Homo sapiens
tgagagccgcagcagcttctcacag

SEQ ID NO: 811 - DNA, 25 bp, Homo sapiens
ttcgagacctggaggactcactggc

SEQ ID NO: 812 - DNA, 25 bp, Homo sapiens
aaatcctgatcaaacgcatgatgat

SEQ ID NO: 813 - DNA, 25 bp, Homo sapiens
agcgactgtgaatgcaaccctgctg

SEQ ID NO: 814 - DNA, 25 bp, Homo sapiens
ctgaggagtattttgcacagactga

SEQ ID NO: 815 - DNA, 25 bp, Homo sapiens
gaataagtttgtgaacagcatcaac

SEQ ID NO: 816 - DNA, 25 bp, Homo sapiens
gctgcgccaggctattattgacatg

SEQ ID NO: 817 - DNA, 25 bp, Homo sapiens
gtagcgtaaacaagaggccttcctt

SEQ ID NO: 818 - DNA, 25 bp, Homo sapiens
gtctcagatctctttcattgactac

SEQ ID NO: 819 - DNA, 25 bp, Homo sapiens
gtttgaccggaatacctgtagcatc

SEQ ID NO: 820 - DNA, 25 bp, Homo sapiens
gtttgaggcttccatctgacagcta

SEQ ID NO: 821 - DNA, 25 bp, Homo sapiens
tattgacatggttttggcaacagag

SEQ ID NO: 822 - DNA, 25 bp, Homo sapiens
tgtagcatccccaagtctcagatct

SEQ ID NO: 823 - DNA, 25 bp, Homo sapiens
aagtctatccgtgagaccatgaagg

SEQ ID NO: 824 - DNA, 25 bp, Homo sapiens
atgatcctgcttggaagtaccgctt

SEQ ID NO: 825 - DNA, 25 bp, Homo sapiens
atggatgctgcctactttggtgaga

SEQ ID NO: 826 - DNA, 25 bp, Homo sapiens
gagcccatggcctacatggatgctg

SEQ ID NO: 827 - DNA, 25 bp, Homo sapiens
gcagcagtggtcaaagtgcccctga

SEQ ID NO: 828 - DNA, 25 bp, Homo sapiens
ggaagtaccgctttggtgacctcag

SEQ ID NO: 829 - DNA, 25 bp, Homo sapiens
ggtgagatcagcatcgggactccac

SEQ ID NO: 830 - DNA, 25 bp, Homo sapiens
gtcaaagtgcccctgaagaaattta

SEQ ID NO: 831 - DNA, 25 bp, Homo sapiens
ttcctgaggacccacaagtatgatc

SEQ ID NO: 832 - DNA, 25 bp, Homo sapiens
ttcctggtcctttttgacaccggct

SEQ ID NO: 833 - DNA, 25 bp, Homo sapiens
ttggtgacctcagcgtgacctacga

SEQ ID NO: 834 - DNA, 25 bp, Homo sapiens
agcaggacgggatggaccgctacct

SEQ ID NO: 835 - DNA, 25 bp, Homo sapiens
agctgtcgaacaaccccgtgaaggg

SEQ ID NO: 836 - DNA, 25 bp, Homo sapiens
cctttgggaagaactgcagcgcggc

SEQ ID NO: 837 - DNA, 25 bp, Homo sapiens
gagtgccattcaggctaccagctgc

SEQ ID NO: 838 - DNA, 25 bp, Homo sapiens
gcaggcatcgtgctgatcggcattc

SEQ ID NO: 839 - DNA, 25 bp, Homo sapiens
gctgcaacgtatgcgagtgccattc

SEQ ID NO: 840 - DNA, 25 bp, Homo sapiens
gctggtcatctggaaggctctgatc

SEQ ID NO: 841 - DNA, 25 bp, Homo sapiens
ggaccgctacctcatctatgtggat

SEQ ID NO: 842 - DNA, 25 bp, Homo sapiens
ggtcatgaaccccaagtttgctgag

SEQ ID NO: 843 - DNA, 25 bp, Homo sapiens
tgcgccgagtgcctgaagttcgaaa

SEQ ID NO: 844 - DNA, 25 bp, Homo sapiens
tggcaagtacatctcctgcgccgag

SEQ ID NO: 845 - DNA, 25 bp, Homo sapiens
aaagcgtcagtcagaggaactctcc

SEQ ID NO: 846 - DNA, 25 bp, Homo sapiens
aatatattcctctcataaccaaccc

SEQ ID NO: 847 - DNA, 25 bp, Homo sapiens
atctgcagactgaggtcccaattaa

SEQ ID NO: 848 - DNA, 25 bp, Homo sapiens
gaaggattccctcataaagcgtcag

SEQ ID NO: 849 - DNA, 25 bp, Homo sapiens
gattggcaaccactacacggagatg

SEQ ID NO: 850 - DNA, 25 bp, Homo sapiens
gcaggtttctgagacttgcacaggc

SEQ ID NO: 851 - DNA, 25 bp, Homo sapiens
ggaactctccaagttgcggcaagaa

SEQ ID NO: 852 - DNA, 25 bp, Homo sapiens
ggacacaatatccaatcctaggcct

SEQ ID NO: 853 - DNA, 25 bp, Homo sapiens
ggcctcctatatgatgactacgaat

SEQ ID NO: 854 - DNA, 25 bp, Homo sapiens
tgactacgaatatataccaccaggt

SEQ ID NO: 855 - DNA, 25 bp, Homo sapiens
tgcacaggcccaatgttgcaggcta

SEQ ID NO: 856 - DNA, 25 bp, Homo sapiens
agtccttggcgctttggtccagaag

SEQ ID NO: 857 - DNA, 25 bp, Homo sapiens
atcttttggagcctaccccttgtgt

SEQ ID NO: 858 - DNA, 25 bp, Homo sapiens
attacatgaaacacggcaagacacc

SEQ ID NO: 859 - DNA, 25 bp, Homo sapiens
gaacatactggagactcaccacggc

SEQ ID NO: 860 - DNA, 25 bp, Homo sapiens
gaaggagtccagattgggtccccct

SEQ ID NO: 861 - DNA, 25 bp, Homo sapiens
gagactttccctggtgcctgcggat

SEQ ID NO: 862 - DNA, 25 bp, Homo sapiens
gcccctccgaggaagaggcacagga

SEQ ID NO: 863 - DNA, 25 bp, Homo sapiens
gggccgaacatactggagactcacc

SEQ ID NO: 864 - DNA, 25 bp, Homo sapiens
tacaggcgtgatgcccgggccttct

SEQ ID NO: 865 - DNA, 25 bp, Homo sapiens
tgcgaagagcgctgggccgaacata

SEQ ID NO: 866 - DNA, 25 bp, Homo sapiens
tgcggatgtccgaggcctcgcgcca

SEQ ID NO: 867 - DNA, 25 bp, Homo sapiens
aagcctgtcacctttgtggatggcc

SEQ ID NO: 868 - DNA, 25 bp, Homo sapiens
agtggtatctcctggtttctctact

SEQ ID NO: 869 - DNA, 25 bp, Homo sapiens
atgacttatctgaccatgtgcatca

SEQ ID NO: 870 - DNA, 25 bp, Homo sapiens
atgcatatctatgccctccatagga

SEQ ID NO: 871 - DNA, 25 bp, Homo sapiens
atggccggtctctacctgcaggaag

SEQ ID NO: 872 - DNA, 25 bp, Homo sapiens
ctgagcaccagcatcgttgtagaga

SEQ ID NO: 873 - DNA, 25 bp, Homo sapiens
gcgcttttccactgagaatgcatcc

SEQ ID NO: 874 - DNA, 25 bp, Homo sapiens
ggaacagtgctgtatggcccgaccc

SEQ ID NO: 875 - DNA, 25 bp, Homo sapiens
ggaagcctgatctctatgcatatct

SEQ ID NO: 876 - DNA, 25 bp, Homo sapiens
ggacttcttccagtgggatgatctg

SEQ ID NO: 877 - DNA, 25 bp, Homo sapiens
ggtttctctactgcatggccctgta

SEQ ID NO: 878 - DNA, 25 bp, Homo sapiens
acctcctgtaagtgtgtgatcatgc

SEQ ID NO: 879 - DNA, 25 bp, Homo sapiens
catgctttctgatgtctgtgacttc

SEQ ID NO: 880 - DNA, 25 bp, Homo sapiens
ctgatgtctgtgacttctctaggac

SEQ ID NO: 881 - DNA, 25 bp, Homo sapiens
gacagcatacctcctgtaagtgtgt

SEQ ID NO: 882 - DNA, 25 bp, Homo sapiens
gacttctctaggactcagtgtttct

SEQ ID NO: 883 - DNA, 25 bp, Homo sapiens
gcatacctcctgtaagtgtgtgatc

SEQ ID NO: 884 - DNA, 25 bp, Homo sapiens
ggactcagtgtttctaatgttgctt

SEQ ID NO: 885 - DNA, 25 bp, Homo sapiens
gtaagtgtgtgatcatgctttctga

SEQ ID NO: 886 - DNA, 25 bp, Homo sapiens
gtctgtgacttctctaggactcagt

SEQ ID NO: 887 - DNA, 25 bp, Homo sapiens
gttgcttatcattgtttgttccatt

SEQ ID NO: 888 - DNA, 25 bp, Homo sapiens
tatcattgtttgttccatttcagtt

SEQ ID NO: 889 - DNA, 25 bp, Homo sapiens
aaagaatctgacatcatgacaacaa

SEQ ID NO: 890 - DNA, 25 bp, Homo sapiens
acacccgtgaggaagttgcaagcca

SEQ ID NO: 891 - DNA, 25 bp, Homo sapiens
agacacacctgttggaaatgatcaa

SEQ ID NO: 892 - DNA, 25 bp, Homo sapiens
atgatcaactgctggaaatacttaa

SEQ ID NO: 893 - DNA, 25 bp, Homo sapiens
attaagtttgttcgtggtagcacct

SEQ ID NO: 894 - DNA, 25 bp, Homo sapiens
attcatgttgtagataaactcctct

SEQ ID NO: 895 - DNA, 25 bp, Homo sapiens
cttcaaagaaatccccgtgactgtc

SEQ ID NO: 896 - DNA, 25 bp, Homo sapiens
gaaggtcgttctcagtgaaaatcca

SEQ ID NO: 897 - DNA, 25 bp, Homo sapiens
gataaactcctctatccagcagaca

SEQ ID NO: 898 - DNA, 25 bp, Homo sapiens
tgacaacaaatggtgtaattcatgt

SEQ ID NO: 899 - DNA, 25 bp, Homo sapiens
tgttcgtggtagcaccttcaaagaa

SEQ ID NO: 900 - DNA, 25 bp, Homo sapiens
aacgatggcagaacgagaagctcgg

SEQ ID NO: 901 - DNA, 25 bp, Homo sapiens
aatagcagcaacaacgccaacgtca

SEQ ID NO: 902 - DNA, 25 bp, Homo sapiens
acacgtggccccctgagttcttggg

SEQ ID NO: 903 - DNA, 25 bp, Homo sapiens
catcctcctgttctgcgcggtggtg

SEQ ID NO: 904 - DNA, 25 bp, Homo sapiens
ggacgactgctccatgtatgaggac

SEQ ID NO: 905 - DNA, 25 bp, Homo sapiens
gtcctccatggcaactacacgtggc

SEQ ID NO: 906 - DNA, 25 bp, Homo sapiens
tccagggcacctaccaggatgtggg

SEQ ID NO: 907 - DNA, 25 bp, Homo sapiens
tccatgtatgaggacatctcccggg

SEQ ID NO: 908 - DNA, 25 bp, Homo sapiens
tgctgctgttcaggaaacgatggca

SEQ ID NO: 909 - DNA, 25 bp, Homo sapiens
tggcgcgtcctccatggcaactaca

SEQ ID NO: 910 - DNA, 25 bp, Homo sapiens
tgttctgcgcggtggtgcctgggac

SEQ ID NO: 911 - DNA, 25 bp, Homo sapiens
acaggattggcgcttttgggtacat

SEQ ID NO: 912 - DNA, 25 bp, Homo sapiens
agaggtgtatgtgcccacagtgttt

SEQ ID NO: 913 - DNA, 25 bp, Homo sapiens
agtcaagcatttctgtcccaacgtg

SEQ ID NO: 914 - DNA, 25 bp, Homo sapiens
caaggaccagttcccagaggtgtat

SEQ ID NO: 915 - DNA, 25 bp, Homo sapiens
catcgacagccctgatagtttagaa

SEQ ID NO: 916 - DNA, 25 bp, Homo sapiens
ctatgtggcagatatcgaggtggat

SEQ ID NO: 917 - DNA, 25 bp, Homo sapiens
gatgtgtttttccatcgacagccct

SEQ ID NO: 918 - DNA, 25 bp, Homo sapiens
gcctgtggaaagacatgcttgctca

SEQ ID NO: 919 - DNA, 25 bp, Homo sapiens
gctgctctgcaagctagacgtggga

SEQ ID NO: 920 - DNA, 25 bp, Homo sapiens
gtcttcagcaaggaccagttcccag

SEQ ID NO: 921 - DNA, 25 bp, Homo sapiens
tgtgcccacagtgtttgagaactat

SEQ ID NO: 922 - DNA, 25 bp, Homo sapiens
aatcattaggtcagtcatttgtaaa

SEQ ID NO: 923 - DNA, 25 bp, Homo sapiens
aattttatagggacctccaatcact

SEQ ID NO: 924 - DNA, 25 bp, Homo sapiens
accttaactttctgagtctatggaa

SEQ ID NO: 925 - DNA, 25 bp, Homo sapiens
attcacacttagcatgtctcaaaga

SEQ ID NO: 926 - DNA, 25 bp, Homo sapiens
gaaatctcatgtaaaccatggccat

SEQ ID NO: 927 - DNA, 25 bp, Homo sapiens
gacctccaatcactaattttcctat

SEQ ID NO: 928 - DNA, 25 bp, Homo sapiens
gataatttcacatctcataaacttg

SEQ ID NO: 929 - DNA, 25 bp, Homo sapiens
gtgtaactcttttttcaagatgtga

SEQ ID NO: 930 - DNA, 25 bp, Homo sapiens
tcataaagccaaacacctgatttca

SEQ ID NO: 931 - DNA, 25 bp, Homo sapiens
tcctgttctaccttaactttctgag

SEQ ID NO: 932 - DNA, 25 bp, Homo sapiens
ttttccagttcttcaccatccattt

SEQ ID NO: 933 - DNA, 25 bp, Homo sapiens
agtgttagatcagacccagaccttc

SEQ ID NO: 934 - DNA, 25 bp, Homo sapiens
cagctccctagtttgtgcttactat

SEQ ID NO: 935 - DNA, 25 bp, Homo sapiens
ggaacactgagctctgaacacctct

SEQ ID NO: 936 - DNA, 25 bp, Homo sapiens
ggtcactctgcaggaacactgagct

SEQ ID NO: 937 - DNA, 25 bp, Homo sapiens
gtttgtgcttactatacctggccac

SEQ ID NO: 938 - DNA, 25 bp, Homo sapiens
taaggccgctggcttaaccctaggg

SEQ ID NO: 939 - DNA, 25 bp, Homo sapiens
tagatggtgggctggaacacccctc

SEQ ID NO: 940 - DNA, 25 bp, Homo sapiens
tattcccagaaagcctcgcgttgag

SEQ ID NO: 941 - DNA, 25 bp, Homo sapiens
tctgcattcgctgtttcctctgttg

SEQ ID NO: 942 - DNA, 25 bp, Homo sapiens
tggatgtgaccccaggtgttcccct

SEQ ID NO: 943 - DNA, 25 bp, Homo sapiens
ttgaggtgtgttggccagctcccta

SEQ ID NO: 944 - DNA, 25 bp, Homo sapiens
aaaagccggctgttctctaccgctt

SEQ ID NO: 945 - DNA, 25 bp, Homo sapiens
agcattacggaattccctccaggaa

SEQ ID NO: 946 - DNA, 25 bp, Homo sapiens
aggaactacagctggacccggatcc

SEQ ID NO: 947 - DNA, 25 bp, Homo sapiens
agtcagcatgggtttctggcttcac

SEQ ID NO: 948 - DNA, 25 bp, Homo sapiens
ctctaccgcttcttgctagaaacaa

SEQ ID NO: 949 - DNA, 25 bp, Homo sapiens
gaatcagaatcgctgcttgcaactt

SEQ ID NO: 950 - DNA, 25 bp, Homo sapiens
gacgtaaactgtcttcttagtgcca

SEQ ID NO: 951 - DNA, 25 bp, Homo sapiens
gagacgctcacagtcttggatagct

SEQ ID NO: 952 - DNA, 25 bp, Homo sapiens
tgaaaaagctggacttcccagcatt

SEQ ID NO: 953 - DNA, 25 bp, Homo sapiens
tgcttgcaacttggcaggaattatt

SEQ ID NO: 954 - DNA, 25 bp, Homo sapiens
ttagtgccaaatgcaagcccttttt

SEQ ID NO: 955 - DNA, 25 bp, Homo sapiens
cttttggcagtttagttcctacttg

SEQ ID NO: 956 - DNA, 25 bp, Homo sapiens
gaatgtttacacatggcagtatcaa

SEQ ID NO: 957 - DNA, 25 bp, Homo sapiens
gactgactctagtcattatggaaaa

SEQ ID NO: 958 - DNA, 25 bp, Homo sapiens
gagattcacatgtaatagacccttt

SEQ ID NO: 959 - DNA, 25 bp, Homo sapiens
gaggtactacatttgatttctcaat

SEQ ID NO: 960 - DNA, 25 bp, Homo sapiens
gatttctcaatttctcagtttgttt

SEQ ID NO: 961 - DNA, 25 bp, Homo sapiens
ggatggcagtacacattgttaacaa

SEQ ID NO: 962 - DNA, 25 bp, Homo sapiens
gttcatttttggatggcagtacaca

SEQ ID NO: 963 - DNA, 25 bp, Homo sapiens
tcctacttgttaacaattcctcttt

SEQ ID NO: 964 - DNA, 25 bp, Homo sapiens
ttgtgtatgtgatgactgactctag

SEQ ID NO: 965 - DNA, 25 bp, Homo sapiens
ttttcaatacaaacagcaaccactg

SEQ ID NO: 966 - DNA, 25 bp, Homo sapiens
aaatctctgtataatgccgacatat

SEQ ID NO: 967 - DNA, 25 bp, Homo sapiens
aaatgatggtcccattactttaggg

SEQ ID NO: 968 - DNA, 25 bp, Homo sapiens
agagctcctgtgtgtaatacccata

SEQ ID NO: 969 - DNA, 25 bp, Homo sapiens
atatactatgcctctgttgattcag

SEQ ID NO: 970 - DNA, 25 bp, Homo sapiens
atctctgtagagctcctgtgtgtaa

SEQ ID NO: 971 - DNA, 25 bp, Homo sapiens
attcttgctacattagttcagcttc

SEQ ID NO: 972 - DNA, 25 bp, Homo sapiens
ggatgagttgctatgttttaccatt

SEQ ID NO: 973 - DNA, 25 bp, Homo sapiens
gttcagcttctacaggtaaccaaat

SEQ ID NO: 974 - DNA, 25 bp, Homo sapiens
tagaaagatggtcccgttactttag

SEQ ID NO: 975 - DNA, 25 bp, Homo sapiens
tgaatctgcgtgtctatttttaggt

SEQ ID NO: 976 - DNA, 25 bp, Homo sapiens
tgccgacatataattctcatgtgtg

SEQ ID NO: 977 - DNA, 25 bp, Homo sapiens
acctcaactgtctgggctgagagag

SEQ ID NO: 978 - DNA, 25 bp, Homo sapiens
agtcctcattccatgtagtcacatc

SEQ ID NO: 979 - DNA, 25 bp, Homo sapiens
ccccactttccaaagcaaagatgct

SEQ ID NO: 980 - DNA, 25 bp, Homo sapiens
cctcattccatgtagtcacatcatc

SEQ ID NO: 981 - DNA, 25 bp, Homo sapiens
gagagcagctatagtcctcattcca

SEQ ID NO: 982 - DNA, 25 bp, Homo sapiens
gatggtgcataaatacctcaactgt

SEQ ID NO: 983 - DNA, 25 bp, Homo sapiens
gcaaagatgctgttaatgttatgat

SEQ ID NO: 984 - DNA, 25 bp, Homo sapiens
gcagctatagtcctcattccatgta

SEQ ID NO: 985 - DNA, 25 bp, Homo sapiens
gcaggtttttaagagagcagctata

SEQ ID NO: 986 - DNA, 25 bp, Homo sapiens
gctatagtcctcattccatgtagtc

SEQ ID NO: 987 - DNA, 25 bp, Homo sapiens
taaatacctcaactgtctgggctga

SEQ ID NO: 988 - DNA, 25 bp, Homo sapiens
agtcccctgttacttctttagtcat

SEQ ID NO: 989 - DNA, 25 bp, Homo sapiens
ataaattctggcttactgcacatat

SEQ ID NO: 990 - DNA, 25 bp, Homo sapiens
catttcctttgactctgctacagat

SEQ ID NO: 991 - DNA, 25 bp, Homo sapiens
ggagctcgattcacgtacagcactt

SEQ ID NO: 992 - DNA, 25 bp, Homo sapiens
gggaccttgaacctattcaccatta

SEQ ID NO: 993 - DNA, 25 bp, Homo sapiens
tcattatttaagagtcccctgttac

SEQ ID NO: 994 - DNA, 25 bp, Homo sapiens
tgacctatcctgcaaacatctaatg

SEQ ID NO: 995 - DNA, 25 bp, Homo sapiens
tgtaaggaccctactttattgccaa

SEQ ID NO: 996 - DNA, 25 bp, Homo sapiens
tgtctctttaagctggcaaacccat

SEQ ID NO: 997 - DNA, 25 bp, Homo sapiens
ttcagtaatcaatgggcagtggcac

SEQ ID NO: 998 - DNA, 25 bp, Homo sapiens
ttgagcacagtgaatgacctatcct

SEQ ID NO: 999 - DNA, 25 bp, Homo sapiens
atcatcttgctgagtgtctcttgaa

SEQ ID NO: 1000 - DNA, 25 bp, Homo sapiens
catcatcttgctgagtcatcatcat

SEQ ID NO: 1001 - DNA, 25 bp, Homo sapiens
gagatgccctaaagaggactgagtg

SEQ ID NO: 1002 - DNA, 25 bp, Homo sapiens
gagcagagtatgtggatacccggaa

SEQ ID NO: 1003 - DNA, 25 bp, Homo sapiens
gagtgtctcttgaagtacaggctgt

SEQ ID NO: 1004 - DNA, 25 bp, Homo sapiens
ggttgtgggccattttcctgaactc

SEQ ID NO: 1005 - DNA, 25 bp, Homo sapiens
gtcgtcgtcatcatcttgctgagtg

SEQ ID NO: 1006 - DNA, 25 bp, Homo sapiens
gtctcttgaagtacaggctgtgaca

SEQ ID NO: 1007 - DNA, 25 bp, Homo sapiens
gtgacaggttgtgggccattttcct

SEQ ID NO: 1008 - DNA, 25 bp, Homo sapiens
gtggatacccggaaacacacacaca

SEQ ID NO: 1009 - DNA, 25 bp, Homo sapiens
tcgtcgtcatcatcttgctgagtca

SEQ ID NO: 1010 - DNA, 25 bp, Homo sapiens
aaaaaacaatcccatggtgtccctg

SEQ ID NO: 1011 - DNA, 25 bp, Homo sapiens
caattgcctggaggcttctgtgaga

SEQ ID NO: 1012 - DNA, 25 bp, Homo sapiens
ctgttgtgtggtggaacctaatgac

SEQ ID NO: 1013 - DNA, 25 bp, Homo sapiens
gagaggcagtctcttgacaaaataa

SEQ ID NO: 1014 - DNA, 25 bp, Homo sapiens
gcaggcaaatgagatggagccctct

SEQ ID NO: 1015 - DNA, 25 bp, Homo sapiens
gccctctctgtaaagaagagtcatt

SEQ ID NO: 1016 - DNA, 25 bp, Homo sapiens
ggcttctgtgagatcgggagaggga

SEQ ID NO: 1017 - DNA, 25 bp, Homo sapiens
gggcacacaattgcctggaggcttc

SEQ ID NO: 1018 - DNA, 25 bp, Homo sapiens
gtggaacctaatgactgttgaaata

SEQ ID NO: 1019 - DNA, 25 bp, Homo sapiens
tcatttgtgcaagtagacggggtct

SEQ ID NO: 1020 - DNA, 25 bp, Homo sapiens
tgtggtggaacctaatgactgttga

SEQ ID NO: 1021 - DNA, 25 bp, Homo sapiens
aaatggttattcctaccagctccag

SEQ ID NO: 1022 - DNA, 25 bp, Homo sapiens
accagaaaggagtgaacagaatgct

SEQ ID NO: 1023 - DNA, 25 bp, Homo sapiens
gacgctgcttcacaccaaaggttta

SEQ ID NO: 1024 - DNA, 25 bp, Homo sapiens
gtagtattgttcctttcaaccaaag

SEQ ID NO: 1025 - DNA, 25 bp, Homo sapiens
gttacacaatatacactagaagact

SEQ ID NO: 1026 - DNA, 25 bp, Homo sapiens
gttattcctaccagctccagaaatg

SEQ ID NO: 1027 - DNA, 25 bp, Homo sapiens
gttcctttcaaccaaagactccaga

SEQ ID NO: 1028 - DNA, 25 bp, Homo sapiens
gtttgcaacttaaatctcagttttc

SEQ ID NO: 1029 - DNA, 25 bp, Homo sapiens
tagcctttgaaatggcaattgggaa

SEQ ID NO: 1030 - DNA, 25 bp, Homo sapiens
tattttccaaatgcactaggaacat

SEQ ID NO: 1031 - DNA, 25 bp, Homo sapiens
tttgtccttaggtagtattgttcct

SEQ ID NO: 1032 - DNA, 25 bp, Homo sapiens
agtgctttcctcttggcttctgaag

SEQ ID NO: 1033 - DNA, 25 bp, Homo sapiens
atctttcctcttaggacaggacaat

SEQ ID NO: 1034 - DNA, 25 bp, Homo sapiens
caaaagggaccagtttcattgattt

SEQ ID NO: 1035 - DNA, 25 bp, Homo sapiens
ctggccttacccaacatattgttaa

SEQ ID NO: 1036 - DNA, 25 bp, Homo sapiens
gaacaactctgaaggacatgtgata

SEQ ID NO: 1037 - DNA, 25 bp, Homo sapiens
gaatgggccaagaatttctatgggc

SEQ ID NO: 1038 - DNA, 25 bp, Homo sapiens
gggctacctatcaaatcatggtgac

SEQ ID NO: 1039 - DNA, 25 bp, Homo sapiens
gtagtactgtgtatactcacggagt

SEQ ID NO: 1040 - DNA, 25 bp, Homo sapiens
gtgggaaacattacaccaatcttta

SEQ ID NO: 1041 - DNA, 25 bp, Homo sapiens
ttctatgggccaagagacaagcagg

SEQ ID NO: 1042 - DNA, 25 bp, Homo sapiens
tttcttctgtttctggccttaccca

SEQ ID NO: 1043 - DNA, 25 bp, Homo sapiens
aaagtgcattttgctcatcggatgc

SEQ ID NO: 1044 - DNA, 25 bp, Homo sapiens
aagtcgcttaatttgctgctcagag

SEQ ID NO: 1045 - DNA, 25 bp, Homo sapiens
agctccatctgtgttgactcctgaa

SEQ ID NO: 1046 - DNA, 25 bp, Homo sapiens
attttccctgatttgtttgcctcat

SEQ ID NO: 1047 - DNA, 25 bp, Homo sapiens
catctccccttggagactttgggat

SEQ ID NO: 1048 - DNA, 25 bp, Homo sapiens
gaaaagggagccattttccctgatt

SEQ ID NO: 1049 - DNA, 25 bp, Homo sapiens
ggcattttgttgttgactcattcaa

SEQ ID NO: 1050 - DNA, 25 bp, Homo sapiens
gtttgcctcatcaacttttcaatca

SEQ ID NO: 1051 - DNA, 25 bp, Homo sapiens
tgaagcccctcatcttggctaatcc

SEQ ID NO: 1052 - DNA, 25 bp, Homo sapiens
tggctaatccggacaggcttgctgg

SEQ ID NO: 1053 - DNA, 25 bp, Homo sapiens
tgtgtcctcggtgggcactgacagt

SEQ ID NO: 1054 - DNA, 25 bp, Homo sapiens
acatggaagctctgcatatgtcagc

SEQ ID NO: 1055 - DNA, 25 bp, Homo sapiens
acgcccgtttgcaagcagtccatgg

SEQ ID NO: 1056 - DNA, 25 bp, Homo sapiens
agcaatggcctatccaaggacatgg

SEQ ID NO: 1057 - DNA, 25 bp, Homo sapiens
atgggctggtccaacctgtttacat

SEQ ID NO: 1058 - DNA, 25 bp, Homo sapiens
caggaggacctttatttcagtgttc

SEQ ID NO: 1059 - DNA, 25 bp, Homo sapiens
ccagccaggaggacctttatttcag

SEQ ID NO: 1060 - DNA, 25 bp, Homo sapiens
ccctggagagtcacgctgacaccat

SEQ ID NO: 1061 - DNA, 25 bp, Homo sapiens
gaagctctgcatatgtcagccaatt

SEQ ID NO: 1062 - DNA, 25 bp, Homo sapiens
gaggacctttatttcagtgttcctc

SEQ ID NO: 1063 - DNA, 25 bp, Homo sapiens
ggaaagccctggagagtcacgctga

SEQ ID NO: 1064 - DNA, 25 bp, Homo sapiens
ttaaataactattcctcctccattc

SEQ ID NO: 1065 - DNA, 25 bp, Homo sapiens
aaggaggatgtgaccgtgtccccat

SEQ ID NO: 1066 - DNA, 25 bp, Homo sapiens
aagggatcacctttttctcatctga

SEQ ID NO: 1067 - DNA, 25 bp, Homo sapiens
atctcaggtttcctacatggctgga

SEQ ID NO: 1068 - DNA, 25 bp, Homo sapiens
atgagagacccaaggatgatcgaga

SEQ ID NO: 1069 - DNA, 25 bp, Homo sapiens
atgaggtggacatcacagtgctcaa

SEQ ID NO: 1070 - DNA, 25 bp, Homo sapiens
cacacacaggcttaggatggcacgt

SEQ ID NO: 1071 - DNA, 25 bp, Homo sapiens
gaactctcgcctgatgttaacaaaa

SEQ ID NO: 1072 - DNA, 25 bp, Homo sapiens
gagcccaagatcaagaagtctgtaa

SEQ ID NO: 1073 - DNA, 25 bp, Homo sapiens
gatggcacgtgctgtaagatttcct

SEQ ID NO: 1074 - DNA, 25 bp, Homo sapiens
gatttcctgagcattacagttctta

SEQ ID NO: 1075 - DNA, 25 bp, Homo sapiens
gtaagtcatgaaagagtctccaaaa

SEQ ID NO: 1076 - DNA, 25 bp, Homo sapiens
cagcctccgtgcaagtattcttaac

SEQ ID NO: 1077 - DNA, 25 bp, Homo sapiens
gatatcgtgggttcttatttaatta

SEQ ID NO: 1078 - DNA, 25 bp, Homo sapiens
gcaaatgctagagcgatttcagctg

SEQ ID NO: 1079 - DNA, 25 bp, Homo sapiens
gcacagtttttcaatggtgaagaaa

SEQ ID NO: 1080 - DNA, 25 bp, Homo sapiens
gctagagcgatttcagctgatagaa

SEQ ID NO: 1081 - DNA, 25 bp, Homo sapiens
ggctgtagcaacgtctgtcaggccc

SEQ ID NO: 1082 - DNA, 25 bp, Homo sapiens
gtattcttaactctttacgcctaat

SEQ ID NO: 1083 - DNA, 25 bp, Homo sapiens
tcctgcgcgcgtagagcaaatgcta

SEQ ID NO: 1084 - DNA, 25 bp, Homo sapiens
ttctgcaaatgttcccagcctccgt

SEQ ID NO: 1085 - DNA, 25 bp, Homo sapiens
ttgtgtttcatctcctgcgcgcgta

SEQ ID NO: 1086 - DNA, 25 bp, Homo sapiens
tttacgcctaatgaacaagcacagt

SEQ ID NO: 1087 - DNA, 25 bp, Homo sapiens
acacagcaccccatgtcgtgatgat

SEQ ID NO: 1088 - DNA, 25 bp, Homo sapiens
atggcagaagcaaaaccctgggttc

SEQ ID NO: 1089 - DNA, 25 bp, Homo sapiens
catgtcgtgatgatgtggcctacat

SEQ ID NO: 1090 - DNA, 25 bp, Homo sapiens
gacattttggaccagggagccctac

SEQ ID NO: 1091 - DNA, 25 bp, Homo sapiens
gagccctacagcgtctcttcaaaaa

SEQ ID NO: 1092 - DNA, 25 bp, Homo sapiens
gatgatgtggcctacatgtacccta

SEQ ID NO: 1093 - DNA, 25 bp, Homo sapiens
ggcagaagcaaaaccctgggttcca

SEQ ID NO: 1094 - DNA, 25 bp, Homo sapiens
ggcctacatgtaccctaccaggagg

SEQ ID NO: 1095 - DNA, 25 bp, Homo sapiens
tgtctggctagtccctgggaacaca

SEQ ID NO: 1096 - DNA, 25 bp, Homo sapiens
tgtgtgtctggctagtccctgggaa

SEQ ID NO: 1097 - DNA, 25 bp, Homo sapiens
ttgcctgtggtcatcgataacttcc

SEQ ID NO: 1098 - DNA, 25 bp, Homo sapiens
aaaggagcagcacttcaggaggtta

SEQ ID NO: 1099 - DNA, 25 bp, Homo sapiens
aatgcctttgatggaccaattacca

SEQ ID NO: 1100 - DNA, 25 bp, Homo sapiens
agacctgcccaatgcctttgatgga

SEQ ID NO: 1101 - DNA, 25 bp, Homo sapiens
agcaaccctactgatgatgacgtga

SEQ ID NO: 1102 - DNA, 25 bp, Homo sapiens
atgatgacgtgagcagcggctcctc

SEQ ID NO: 1103 - DNA, 25 bp, Homo sapiens
caactccatctgtgcagcaaacaac

SEQ ID NO: 1104 - DNA, 25 bp, Homo sapiens
caggaggttacatcttttacacctt

SEQ ID NO: 1105 - DNA, 25 bp, Homo sapiens
cctcccagtatgacacatattgctt

SEQ ID NO: 1106 - DNA, 25 bp, Homo sapiens
tacagaacgaatcctgaagacatct

SEQ ID NO: 1107 - DNA, 25 bp, Homo sapiens
tattgttaaccgtgatggcacccgc

SEQ ID NO: 1108 - DNA, 25 bp, Homo sapiens
tggcacccgctatgtccagaaagga

SEQ ID NO: 1109 - DNA, 25 bp, Homo sapiens
aatgttcctcagctgatgagtgggt

SEQ ID NO: 1110 - DNA, 25 bp, Homo sapiens
agttaccttgtgacctagcaatccc

SEQ ID NO: 1111 - DNA, 25 bp, Homo sapiens
atagataccattttatgcccactag

SEQ ID NO: 1112 - DNA, 25 bp, Homo sapiens
caaaaagttaccttgtgacctagca

SEQ ID NO: 1113 - DNA, 25 bp, Homo sapiens
caaacccttacacattgttgatgag

SEQ ID NO: 1114 - DNA, 25 bp, Homo sapiens
ccactagaatggctataagatagat

SEQ ID NO: 1115 - DNA, 25 bp, Homo sapiens
ctagcaatcccattcgaagagagtt

SEQ ID NO: 1116 - DNA, 25 bp, Homo sapiens
ctggcagttcttcagagttaaaaca

SEQ ID NO: 1117 - DNA, 25 bp, Homo sapiens
gataccattttatgcccactagaat

SEQ ID NO: 1118 - DNA, 25 bp, Homo sapiens
gttcctcagctgatgagtgggtaaa

SEQ ID NO: 1119 - DNA, 25 bp, Homo sapiens
tggagaaatcaaacccttacacatt

SEQ ID NO: 1120 - DNA, 25 bp, Homo sapiens
aacctgcaaggacctagacacatgc

SEQ ID NO: 1121 - DNA, 25 bp, Homo sapiens
aaggaaagccagatcagaagtttga

SEQ ID NO: 1122 - DNA, 25 bp, Homo sapiens
agagttcatttatcccagaagtata

SEQ ID NO: 1123 - DNA, 25 bp, Homo sapiens
cacagaggatgctcaggccgcagtg

SEQ ID NO: 1124 - DNA, 25 bp, Homo sapiens
gattattacacaaccacaccagcgt

SEQ ID NO: 1125 - DNA, 25 bp, Homo sapiens
gcaagagcttggacgtgtgatacat

SEQ ID NO: 1126 - DNA, 25 bp, Homo sapiens
gctcaggccgcagtggattattaca

SEQ ID NO: 1127 - DNA, 25 bp, Homo sapiens
gctggtagaaccatttggagtcatt

SEQ ID NO: 1128 - DNA, 25 bp, Homo sapiens
tattgaaatggcaaccacagaggat

SEQ ID NO: 1129 - DNA, 25 bp, Homo sapiens
tgtgatacatctcagcaatttgccg

SEQ ID NO: 1130 - DNA, 25 bp, Homo sapiens
ttggcaagccagtgagagttcattt

SEQ ID NO: 1131 - DNA, 25 bp, Homo sapiens
agaatcagtcagcaggccagcggcc

SEQ ID NO: 1132 - DNA, 25 bp, Homo sapiens
agagatggtggctccaaggctctgc

SEQ ID NO: 1133 - DNA, 25 bp, Homo sapiens
atcctggaactgaatgcaattactt

SEQ ID NO: 1134 - DNA, 25 bp, Homo sapiens
ccttcacagaggattatggtcattt

SEQ ID NO: 1135 - DNA, 25 bp, Homo sapiens
ctcctgctggttggccggctcagag

SEQ ID NO: 1136 - DNA, 25 bp, Homo sapiens
gatcctgatgccaggttacagggct

SEQ ID NO: 1137 - DNA, 25 bp, Homo sapiens
gcctgccaacgtgaatggcttgcag

SEQ ID NO: 1138 - DNA, 25 bp, Homo sapiens
gggaataatctgtccttcacagagg

SEQ ID NO: 1139 - DNA, 25 bp, Homo sapiens
tacttaaactcagtctcagcttcct

SEQ ID NO: 1140 - DNA, 25 bp, Homo sapiens
tgggaaagagccactgtcctcgcag

SEQ ID NO: 1141 - DNA, 25 bp, Homo sapiens
ttctcatcacctatcctggaactga

SEQ ID NO: 1142 - DNA, 25 bp, Homo sapiens
aacgttccgatcctctatactgcat

SEQ ID NO: 1143 - DNA, 25 bp, Homo sapiens
acgttccgatcctctatactgcatc

SEQ ID NO: 1144 - DNA, 25 bp, Homo sapiens
actggcatatgcactcaataacttt

SEQ ID NO: 1145 - DNA, 25 bp, Homo sapiens
atgcactcaataactttgacaaaca

SEQ ID NO: 1146 - DNA, 25 bp, Homo sapiens
ccttgagcttcagcgaggagcgctt

SEQ ID NO: 1147 - DNA, 25 bp, Homo sapiens
gaccccttgagcttcagcgaggagc

SEQ ID NO: 1148 - DNA, 25 bp, Homo sapiens
gagaactggcatatgcactcaataa

SEQ ID NO: 1149 - DNA, 25 bp, Homo sapiens
gaggagaactggcatatgcactcaa

SEQ ID NO: 1150 - DNA, 25 bp, Homo sapiens
ggcatatgcactcaataactttgac

SEQ ID NO: 1151 - DNA, 25 bp, Homo sapiens
tggataagctgaacattatggcagc

SEQ ID NO: 1152 - DNA, 25 bp, Homo sapiens
ttgagcttcagcgaggagcgcttta

SEQ ID NO: 1153 - DNA, 25 bp, Homo sapiens
acagatgtttgacttatgagatgaa

SEQ ID NO: 1154 - DNA, 25 bp, Homo sapiens
actgatatgaatttctactgtccca

SEQ ID NO: 1155 - DNA, 25 bp, Homo sapiens
agtcaaagcctatcaggagctatct

SEQ ID NO: 1156 - DNA, 25 bp, Homo sapiens
atagactattcttttcaactatgaa

SEQ ID NO: 1157 - DNA, 25 bp, Homo sapiens
atatgatgttggtagcctgtgaaaa

SEQ ID NO: 1158 - DNA, 25 bp, Homo sapiens
ctactgtcccataacactgtgtagt

SEQ ID NO: 1159 - DNA, 25 bp, Homo sapiens
gaatttctactgtcccataacactg

SEQ ID NO: 1160 - DNA, 25 bp, Homo sapiens
gacttcactgtatattaacttcttt

SEQ ID NO: 1161 - DNA, 25 bp, Homo sapiens
tcactgtatattaacttcttttcta

SEQ ID NO: 1162 - DNA, 25 bp, Homo sapiens
tcaggagctatcttatatgatgttg

SEQ ID NO: 1163 - DNA, 25 bp, Homo sapiens
tttctactgtcccataacactgtgt

SEQ ID NO: 1164 - DNA, 25 bp, Homo sapiens
aaggaggctgctcttgttaccactt

SEQ ID NO: 1165 - DNA, 25 bp, Homo sapiens
aatttacatgttgaagcacctcaga

SEQ ID NO: 1166 - DNA, 25 bp, Homo sapiens
aggatagaccctaattcaatatgac

SEQ ID NO: 1167 - DNA, 25 bp, Homo sapiens
atttacttacaaggaggctgctctt

SEQ ID NO: 1168 - DNA, 25 bp, Homo sapiens
gcgagtagggcacaacaggcacaaa

SEQ ID NO: 1169 - DNA, 25 bp, Homo sapiens
gctgctcttgttaccacttttatta

SEQ ID NO: 1170 - DNA, 25 bp, Homo sapiens
ggaaggacaactctttacaagctaa

SEQ ID NO: 1171 - DNA, 25 bp, Homo sapiens
gggttgataatgtctccccaaaatt

SEQ ID NO: 1172 - DNA, 25 bp, Homo sapiens
tacaagctaagaagagagggcctca

SEQ ID NO: 1173 - DNA, 25 bp, Homo sapiens
tacgtatcacttattcagctctgct

SEQ ID NO: 1174 - DNA, 25 bp, Homo sapiens
tctcttgtgggttgataatgtctcc

SEQ ID NO: 1175 - DNA, 25 bp, Homo sapiens
aagggcagtcaccatgaaaggaaaa

SEQ ID NO: 1176 - DNA, 25 bp, Homo sapiens
aatggagccaatagacacttcacaa

SEQ ID NO: 1177 - DNA, 25 bp, Homo sapiens
atgtttttgaattggatgttcccgg

SEQ ID NO: 1178 - DNA, 25 bp, Homo sapiens
cagaggctccttaaaaatatgttca

SEQ ID NO: 1179 - DNA, 25 bp, Homo sapiens
cagcccatcatcaagattcctttga

SEQ ID NO: 1180 - DNA, 25 bp, Homo sapiens
gaacagcatagagccaatcacattt

SEQ ID NO: 1181 - DNA, 25 bp, Homo sapiens
gaacataatgttgttgcaccatata

SEQ ID NO: 1182 - DNA, 25 bp, Homo sapiens
gagccaatcacattttgcacaaggg

SEQ ID NO: 1183 - DNA, 25 bp, Homo sapiens
gaggagtactactttgaacagcata

SEQ ID NO: 1184 - DNA, 25 bp, Homo sapiens
gggtatttcactcattttcagtcag

SEQ ID NO: 1185 - DNA, 25 bp, Homo sapiens
tgaaccagattcaatatcccagccc

SEQ ID NO: 1186 - DNA, 25 bp, Homo sapiens
aaagaaccctatatggacagtctgg

SEQ ID NO: 1187 - DNA, 25 bp, Homo sapiens
accctatatggacagtctggtctct

SEQ ID NO: 1188 - DNA, 25 bp, Homo sapiens
agaaccctatatggacagtctggtc

SEQ ID NO: 1189 - DNA, 25 bp, Homo sapiens
agcacaatccaaaggcaaagaaagg

SEQ ID NO: 1190 - DNA, 25 bp, Homo sapiens
caacagcacaatccaaaggcaaaga

SEQ ID NO: 1191 - DNA, 25 bp, Homo sapiens
ccctatatggacagtctggtctctg

SEQ ID NO: 1192 - DNA, 25 bp, Homo sapiens
ctatatggacagtctggtctctgga

SEQ ID NO: 1193 - DNA, 25 bp, Homo sapiens
gaaccctatatggacagtctggtct

SEQ ID NO: 1194 - DNA, 25 bp, Homo sapiens
gaatcacaaaaagaaccctatatgg

SEQ ID NO: 1195 - DNA, 25 bp, Homo sapiens
gacactaacaacagcacaatccaaa

SEQ ID NO: 1196 - DNA, 25 bp, Homo sapiens
taacaacagcacaatccaaaggcaa

SEQ ID NO: 1197 - DNA, 25 bp, Homo sapiens
aaccaccttgtttcatgtctgcaag

SEQ ID NO: 1198 - DNA, 25 bp, Homo sapiens
aatatagtctggcatggcattttaa

SEQ ID NO: 1199 - DNA, 25 bp, Homo sapiens
agagcagcagtttacacaccctcag

SEQ ID NO: 1200 - DNA, 25 bp, Homo sapiens
agcattgctgacatgttgacccaac

SEQ ID NO: 1201 - DNA, 25 bp, Homo sapiens
aggaggaaccaccttgtttcatgtc

SEQ ID NO: 1202 - DNA, 25 bp, Homo sapiens
atttgcttgggaagtttcactacat

SEQ ID NO: 1203 - DNA, 25 bp, Homo sapiens
ctgcaagctgctccatatgaaagca

SEQ ID NO: 1204 - DNA, 25 bp, Homo sapiens
gatgttggtccacttttatgactga

SEQ ID NO: 1205 - DNA, 25 bp, Homo sapiens
tattgggaggtcagtgttagcacat

SEQ ID NO: 1206 - DNA, 25 bp, Homo sapiens
tctctttcacaagtctatgtctata

SEQ ID NO: 1207 - DNA, 25 bp, Homo sapiens
ttcctttctattgatgttggtccac

SEQ ID NO: 1208 - DNA, 25 bp, Homo sapiens
aaaggcagatggcagcagaatacta

SEQ ID NO: 1209 - DNA, 25 bp, Homo sapiens
acacctccaatagtctgtccaaaga

SEQ ID NO: 1210 - DNA, 25 bp, Homo sapiens
caaaaatacacgttcgggccaggcg

SEQ ID NO: 1211 - DNA, 25 bp, Homo sapiens
ccaatagtctgtccaaagagggtga

SEQ ID NO: 1212 - DNA, 25 bp, Homo sapiens
cctcaacttatgacgcagttgtgat

SEQ ID NO: 1213 - DNA, 25 bp, Homo sapiens
gaagacacctccaatagtctgtcca

SEQ ID NO: 1214 - DNA, 25 bp, Homo sapiens
gcagcagaatactaggaagacacct

SEQ ID NO: 1215 - DNA, 25 bp, Homo sapiens
ggaagtacagacatatcctgagtta

SEQ ID NO: 1216 - DNA, 25 bp, Homo sapiens
ggataaaccaactctatattgaaaa

SEQ ID NO: 1217 - DNA, 25 bp, Homo sapiens
gtaccctcctcaacttatgacgcag

SEQ ID NO: 1218 - DNA, 25 bp, Homo sapiens
gttacttcggataaaccaactctat

SEQ ID NO: 1219 - DNA, 25 bp, Homo sapiens
cataaaaacagtaacctcttcccat

SEQ ID NO: 1220 - DNA, 25 bp, Homo sapiens
ctattacccctgctaaggcggctgc

SEQ ID NO: 1221 - DNA, 25 bp, Homo sapiens
gaacgcggcttctcggaaaggaaga

SEQ ID NO: 1222 - DNA, 25 bp, Homo sapiens
gaagggctggtcgagtccacgctct

SEQ ID NO: 1223 - DNA, 25 bp, Homo sapiens
gagccagaatgtcgtcactcatcgg

SEQ ID NO: 1224 - DNA, 25 bp, Homo sapiens
gcatcatcatgctgcgacgagctga

SEQ ID NO: 1225 - DNA, 25 bp, Homo sapiens
gcgcccgacgcatttgcatcatcat

SEQ ID NO: 1226 - DNA, 25 bp, Homo sapiens
gctgttcttggctgtaaattagact

SEQ ID NO: 1227 - DNA, 25 bp, Homo sapiens
gggcgccgcagaggcacaaagccaa

SEQ ID NO: 1228 - DNA, 25 bp, Homo sapiens
gtagttcaacaacggaacgcggctt

SEQ ID NO: 1229 - DNA, 25 bp, Homo sapiens
taaagtccatgatccttagaattag

SEQ ID NO: 1230 - DNA, 25 bp, Homo sapiens
aattgtatttatgttaactgcttaa

SEQ ID NO: 1231 - DNA, 25 bp, Homo sapiens
atggtatcttaaacatgtgcttgtt

SEQ ID NO: 1232 - DNA, 25 bp, Homo sapiens
atttcaaatatgtagtatcttcaga

SEQ ID NO: 1233 - DNA, 25 bp, Homo sapiens
gcatttgtcgtgaacattcatttca

SEQ ID NO: 1234 - DNA, 25 bp, Homo sapiens
ggcatttgtcgtgaacattcatttc

SEQ ID NO: 1235 - DNA, 25 bp, Homo sapiens
gggcatttgtcgtgaacattcattt

SEQ ID NO: 1236 - DNA, 25 bp, Homo sapiens
ggtatcttaaacatgtgcttgtttt

SEQ ID NO: 1237 - DNA, 25 bp, Homo sapiens
gtagtatcttcagaatatttgagaa

SEQ ID NO: 1238 - DNA, 25 bp, Homo sapiens
tcaaatatgtagtatcttcagaata

SEQ ID NO: 1239 - DNA, 25 bp, Homo sapiens
tcttaaacatgtgcttgtttttcta

SEQ ID NO: 1240 - DNA, 25 bp, Homo sapiens
ttatggtatcttaaacatgtgcttg

SEQ ID NO: 1241 - DNA, 25 bp, Homo sapiens
aagggaacagatcaccacttccaat

SEQ ID NO: 1242 - DNA, 25 bp, Homo sapiens
accacagtgtgtgcagcagtactag

SEQ ID NO: 1243 - DNA, 25 bp, Homo sapiens
actaccctcaattgcagctctgaag

SEQ ID NO: 1244 - DNA, 25 bp, Homo sapiens
agacagaagcccatgtcctcagggt

SEQ ID NO: 1245 - DNA, 25 bp, Homo sapiens
atctcgcattgcattttatctggga

SEQ ID NO: 1246 - DNA, 25 bp, Homo sapiens
attctggacaaactagcagtgcttc

SEQ ID NO: 1247 - DNA, 25 bp, Homo sapiens
cacttccaatacacgacaatgcctg

SEQ ID NO: 1248 - DNA, 25 bp, Homo sapiens
gactgtaacagaagtatctcgcatt

SEQ ID NO: 1249 - DNA, 25 bp, Homo sapiens
gcagtgcttcatataatcactcaaa

SEQ ID NO: 1250 - DNA, 25 bp, Homo sapiens
ggagtttgggctctgaattactata

SEQ ID NO: 1251 - DNA, 25 bp, Homo sapiens
gggcaatttcttataacctcaacat

SEQ ID NO: 1252 - DNA, 25 bp, Homo sapiens
aatgtccctctaagtctatccttgg

SEQ ID NO: 1253 - DNA, 25 bp, Homo sapiens
catctgtcatcatggctgagcgaaa

SEQ ID NO: 1254 - DNA, 25 bp, Homo sapiens
gaaattctccataagggaaccctgt

SEQ ID NO: 1255 - DNA, 25 bp, Homo sapiens
gggctagaaattaccctgcttctat

SEQ ID NO: 1256 - DNA, 25 bp, Homo sapiens
ggttctccaacctacatagacttaa

SEQ ID NO: 1257 - DNA, 25 bp, Homo sapiens
gtgcaatttcatcttactcagtcct

SEQ ID NO: 1258 - DNA, 25 bp, Homo sapiens
taccctgcttctatttaacaaactg

SEQ ID NO: 1259 - DNA, 25 bp, Homo sapiens
tactcagtcctgaacgcagggctag

SEQ ID NO: 1260 - DNA, 25 bp, Homo sapiens
tggcaaggacttgtggttctccaac

SEQ ID NO: 1261 - DNA, 25 bp, Homo sapiens
ttagtaaacctacacacacgctgaa

SEQ ID NO: 1262 - DNA, 25 bp, Homo sapiens
ttcctccaagagtgttcgatttcaa

SEQ ID NO: 1263 - DNA, 25 bp, Homo sapiens
aatgccaatgtcagcatcaagcccc

SEQ ID NO: 1264 - DNA, 25 bp, Homo sapiens
accacccaacagtgatgatgcatgg

SEQ ID NO: 1265 - DNA, 25 bp, Homo sapiens
atgggacagccaagttatacccaac

SEQ ID NO: 1266 - DNA, 25 bp, Homo sapiens
attcttggcatctactctggaccaa

SEQ ID NO: 1267 - DNA, 25 bp, Homo sapiens
catgcatacgtacattcctggacac

SEQ ID NO: 1268 - DNA, 25 bp, Homo sapiens
gactgtggagttccattcttggcat

SEQ ID NO: 1269 - DNA, 25 bp, Homo sapiens
gagtggacaagtcatggacattcat

SEQ ID NO: 1270 - DNA, 25 bp, Homo sapiens
ggacattcatgctcagtagcttaag

SEQ ID NO: 1271 - DNA, 25 bp, Homo sapiens
ggaccaaggagcatccctaattctt

SEQ ID NO: 1272 - DNA, 25 bp, Homo sapiens
gttcttaatacaggagacccaacaa

SEQ ID NO: 1273 - DNA, 25 bp, Homo sapiens
tcaagccccacagttcttaatacag

SEQ ID NO: 1274 - DNA, 25 bp, Homo sapiens
aagttgtttgaattttcgacaccag

SEQ ID NO: 1275 - DNA, 25 bp, Homo sapiens
aggtctctgaggtggtttaaaggct

SEQ ID NO: 1276 - DNA, 25 bp, Homo sapiens
atgaactttccagagatcagtggta

SEQ ID NO: 1277 - DNA, 25 bp, Homo sapiens
cagagatcagtggtaataagttgtt

SEQ ID NO: 1278 - DNA, 25 bp, Homo sapiens
gaactttccagagatcagtggtaat

SEQ ID NO: 1279 - DNA, 25 bp, Homo sapiens
gacaccagattaaggtctctgaggt

SEQ ID NO: 1280 - DNA, 25 bp, Homo sapiens
gattaaggtctctgaggtggtttaa

SEQ ID NO: 1281 - DNA, 25 bp, Homo sapiens
gtctctgaggtggtttaaaggctat

SEQ ID NO: 1282 - DNA, 25 bp, Homo sapiens
gtttgaattttcgacaccagattaa

SEQ ID NO: 1283 - DNA, 25 bp, Homo sapiens
tggtttaaaggctatgaggccaggt

SEQ ID NO: 1284 - DNA, 25 bp, Homo sapiens
ttttcgacaccagattaaggtctct

SEQ ID NO: 1285 - DNA, 25 bp, Homo sapiens
aacctatgacctcacacaaatctgt

SEQ ID NO: 1286 - DNA, 25 bp, Homo sapiens
aattttcctggtatagtgtccttct

SEQ ID NO: 1287 - DNA, 25 bp, Homo sapiens
agtctctgtgaaactgggccaaaga

SEQ ID NO: 1288 - DNA, 25 bp, Homo sapiens
ataaattttcctggtatagtgtcct

SEQ ID NO: 1289 - DNA, 25 bp, Homo sapiens
atgtcctacagtctctgtgaaactg

SEQ ID NO: 1290 - DNA, 25 bp, Homo sapiens
attttcctggtatagtgtccttctc

SEQ ID NO: 1291 - DNA, 25 bp, Homo sapiens
ctctagacctcatgtcctacagtct

SEQ ID NO: 1292 - DNA, 25 bp, Homo sapiens
gaaactgggccaaagatagaatttt

SEQ ID NO: 1293 - DNA, 25 bp, Homo sapiens
tacagtctctgtgaaactgggccaa

SEQ ID NO: 1294 - DNA, 25 bp, Homo sapiens
ttcctggtatagtgtccttctctag

SEQ ID NO: 1295 - DNA, 25 bp, Homo sapiens
ttctctagacctcatgtcctacagt

SEQ ID NO: 1296 - DNA, 25 bp, Homo sapiens
aaatttctacttagctcctgtgggt

SEQ ID NO: 1297 - DNA, 25 bp, Homo sapiens
aggctagggattaagtggagaaaca

SEQ ID NO: 1298 - DNA, 25 bp, Homo sapiens
ccttcagagatcatatgtcattact

SEQ ID NO: 1299 - DNA, 25 bp, Homo sapiens
gagatcatatgtcattactcatata

SEQ ID NO: 1300 - DNA, 25 bp, Homo sapiens
ggatttcttggcattatctttccta

SEQ ID NO: 1301 - DNA, 25 bp, Homo sapiens
tcctatcaagatatatgttcattat

SEQ ID NO: 1302 - DNA, 25 bp, Homo sapiens
tgaagtatgggtgatcatgatgaaa

SEQ ID NO: 1303 - DNA, 25 bp, Homo sapiens
ttaatgtatttacttctggacacac

SEQ ID NO: 1304 - DNA, 25 bp, Homo sapiens
ttcttggcattatctttcctatcaa

SEQ ID NO: 1305 - DNA, 25 bp, Homo sapiens
ttggcattatctttcctatcaagat

SEQ ID NO: 1306 - DNA, 25 bp, Homo sapiens
tttctacttagctcctgtgggtttc

SEQ ID NO: 1307 - DNA, 25 bp, Homo sapiens
aatgtcgtcataatcatgtcatgcc

SEQ ID NO: 1308 - DNA, 25 bp, Homo sapiens
atgcctaatgatgacctactcagcc

SEQ ID NO: 1309 - DNA, 25 bp, Homo sapiens
catgtacattaggtcgaataactct

SEQ ID NO: 1310 - DNA, 25 bp, Homo sapiens
ctagatatcatgtacattaggtcga

SEQ ID NO: 1311 - DNA, 25 bp, Homo sapiens
gaaatgtcgtcataatcatgtcatg

SEQ ID NO: 1312 - DNA, 25 bp, Homo sapiens
gaataactctagaaatgtcgtcata

SEQ ID NO: 1313 - DNA, 25 bp, Homo sapiens
gtacattaggtcgaataactctaga

SEQ ID NO: 1314 - DNA, 25 bp, Homo sapiens
gtcataatcatgtcatgcctaatga

SEQ ID NO: 1315 - DNA, 25 bp, Homo sapiens
taatgatgacctactcagcccctgc

SEQ ID NO: 1316 - DNA, 25 bp, Homo sapiens
tgcctaatgatgacctactcagccc

SEQ ID NO: 1317 - DNA, 25 bp, Homo sapiens
tgtcgtcataatcatgtcatgccta

SEQ ID NO: 1318 - DNA, 25 bp, Homo sapiens
aatcgtgcgtcggtgtttacttagc

SEQ ID NO: 1319 - DNA, 25 bp, Homo sapiens
atggccccagcctgttaactgtgat

SEQ ID NO: 1320 - DNA, 25 bp, Homo sapiens
gctctgtatgcactgatgtctgttt

SEQ ID NO: 1321 - DNA, 25 bp, Homo sapiens
ggaaccgtttaactcagaactagct

SEQ ID NO: 1322 - DNA, 25 bp, Homo sapiens
ggagatttctaccatttactattta

SEQ ID NO: 1323 - DNA, 25 bp, Homo sapiens
gtgctgaatgcctataaaccatgtt

SEQ ID NO: 1324 - DNA, 25 bp, Homo sapiens
gtgtttacttagctgtatggcccca

SEQ ID NO: 1325 - DNA, 25 bp, Homo sapiens
gttaactgtgatctgttctacttct

SEQ ID NO: 1326 - DNA, 25 bp, Homo sapiens
tattccgtgtgagcgaatcgtgcgt

SEQ ID NO: 1327 - DNA, 25 bp, Homo sapiens
tctgctgcaagcctagaaactgact

SEQ ID NO: 1328 - DNA, 25 bp, Homo sapiens
ttagcagctaagtcttcccagggaa

SEQ ID NO: 1329 - DNA, 25 bp, Homo sapiens
aaagctctgaattagtgctcagtgt

SEQ ID NO: 1330 - DNA, 25 bp, Homo sapiens
gatccttgttctgaattactactgt

SEQ ID NO: 1331 - DNA, 25 bp, Homo sapiens
gctatgacacatgtgctaccttttt

SEQ ID NO: 1332 - DNA, 25 bp, Homo sapiens
gctgggctgaactcgaattcctggc

SEQ ID NO: 1333 - DNA, 25 bp, Homo sapiens
ggcaagtttggtaatgtgtcttaat

SEQ ID NO: 1334 - DNA, 25 bp, Homo sapiens
gtcaggctgttgtgtgttagagtac

SEQ ID NO: 1335 - DNA, 25 bp, Homo sapiens
gttagagtacacgattggcaagttt

SEQ ID NO: 1336 - DNA, 25 bp, Homo sapiens
gttctggcgattgtcgtgcttcagc

SEQ ID NO: 1337 - DNA, 25 bp, Homo sapiens
tagcccagtgatccttgttctgaat

SEQ ID NO: 1338 - DNA, 25 bp, Homo sapiens
tgctttgctgtgtattataatatgc

SEQ ID NO: 1339 - DNA, 25 bp, Homo sapiens
tgttggctgggctgaactcgaattc

SEQ ID NO: 1340 - DNA, 25 bp, Homo sapiens
aactcttgatcatctctaaactaga

SEQ ID NO: 1341 - DNA, 25 bp, Homo sapiens
agccaatggagctgccacataagat

SEQ ID NO: 1342 - DNA, 25 bp, Homo sapiens
atatcacatctatggttggcaggag

SEQ ID NO: 1343 - DNA, 25 bp, Homo sapiens
attgcagctacttatcaagcacttt

SEQ ID NO: 1344 - DNA, 25 bp, Homo sapiens
gcaaacgactttgggtttatgcata

SEQ ID NO: 1345 - DNA, 25 bp, Homo sapiens
gcatatgtcatgttttctctggcaa

SEQ ID NO: 1346 - DNA, 25 bp, Homo sapiens
ggcaactgcacagaatcatctctaa

SEQ ID NO: 1347 - DNA, 25 bp, Homo sapiens
taatacaaaatgtctggtggcccta

SEQ ID NO: 1348 - DNA, 25 bp, Homo sapiens
tattggcctcaggagatgtctcaac

SEQ ID NO: 1349 - DNA, 25 bp, Homo sapiens
tgctcctggtcagtaggcctgaagg

SEQ ID NO: 1350 - DNA, 25 bp, Homo sapiens
ttctactgatccatattggcctcag

SEQ ID NO: 1351 - DNA, 25 bp, Homo sapiens
aaatacccagggagcgattccttat

SEQ ID NO: 1352 - DNA, 25 bp, Homo sapiens
aatgctgacccactcagtagagcag

SEQ ID NO: 1353 - DNA, 25 bp, Homo sapiens
acttctctctttccagtgtgctgaa

SEQ ID NO: 1354 - DNA, 25 bp, Homo sapiens
cacatctggcctgacgttctcgttg

SEQ ID NO: 1355 - DNA, 25 bp, Homo sapiens
cagggagcgattccttatgtacccc

SEQ ID NO: 1356 - DNA, 25 bp, Homo sapiens
ctcctccagataaatggccccagaa

SEQ ID NO: 1357 - DNA, 25 bp, Homo sapiens
ctgaagaagggaggtgccacccctc

SEQ ID NO: 1358 - DNA, 25 bp, Homo sapiens
gggacgaagtcaccaatccaggcac

SEQ ID NO: 1359 - DNA, 25 bp, Homo sapiens
taaatggccccagaaaacgatccaa

SEQ ID NO: 1360 - DNA, 25 bp, Homo sapiens
tgacgttctcgttgcatcaagccat

SEQ ID NO: 1361 - DNA, 25 bp, Homo sapiens
ttgcatcaagccatcatccaccggg

SEQ ID NO: 1362 - DNA, 25 bp, Homo sapiens
aacaatgatgtgagccttacagggt

SEQ ID NO: 1363 - DNA, 25 bp, Homo sapiens
aacactctaggtcatcaccttcttc

SEQ ID NO: 1364 - DNA, 25 bp, Homo sapiens
aattgaatcctaggtctgacactga

SEQ ID NO: 1365 - DNA, 25 bp, Homo sapiens
agccttacagggtgcagactgctaa

SEQ ID NO: 1366 - DNA, 25 bp, Homo sapiens
caactacaacctgaaaacaatgatg

SEQ ID NO: 1367 - DNA, 25 bp, Homo sapiens
ctttttctgttaatggagcccttag

SEQ ID NO: 1368 - DNA, 25 bp, Homo sapiens
gaatcctaggtctgacactgactag

SEQ ID NO: 1369 - DNA, 25 bp, Homo sapiens
ggaagtttctcaacactctaggtca

SEQ ID NO: 1370 - DNA, 25 bp, Homo sapiens
gggtgcagactgctaaactttttct

SEQ ID NO: 1371 - DNA, 25 bp, Homo sapiens
tgacactgactagtgtagggccttt

SEQ ID NO: 1372 - DNA, 25 bp, Homo sapiens
tgtagggcctttgggaagtttctca

SEQ ID NO: 1373 - DNA, 25 bp, Homo sapiens
aaaaaaccgtgctgctaatcctgct

SEQ ID NO: 1374 - DNA, 25 bp, Homo sapiens
aaggctctcactgatgaaagtgcca

SEQ ID NO: 1375 - DNA, 25 bp, Homo sapiens
aattcgcaattgctgtttgagggca

SEQ ID NO: 1376 - DNA, 25 bp, Homo sapiens
acttggtggaccgacgaggctcaaa

SEQ ID NO: 1377 - DNA, 25 bp, Homo sapiens
atatcctgatttcattgctcgcctt

SEQ ID NO: 1378 - DNA, 25 bp, Homo sapiens
atcaggacttcgagatgatgccatt

SEQ ID NO: 1379 - DNA, 25 bp, Homo sapiens
gctaatcctgctattgccattacat

SEQ ID NO: 1380 - DNA, 25 bp, Homo sapiens
ggaactgtaaacaaccatcaggact

SEQ ID NO: 1381 - DNA, 25 bp, Homo sapiens
ggatctgggaactacttatcagtct

SEQ ID NO: 1382 - DNA, 25 bp, Homo sapiens
ggctcaaaggaaccatatcctgatt

SEQ ID NO: 1383 - DNA, 25 bp, Homo sapiens
ttcattgctcgccttcaagacgcag

SEQ ID NO: 1384 - DNA, 25 bp, Homo sapiens
aagtccagtggttacatatatgcat

SEQ ID NO: 1385 - DNA, 25 bp, Homo sapiens
acatctgttgtaaataggcagccca

SEQ ID NO: 1386 - DNA, 25 bp, Homo sapiens
actctcaacctcctgattacttaag

SEQ ID NO: 1387 - DNA, 25 bp, Homo sapiens
aggattgcctgaagctgggttcaag

SEQ ID NO: 1388 - DNA, 25 bp, Homo sapiens
aggcagcccatatattctgccagag

SEQ ID NO: 1389 - DNA, 25 bp, Homo sapiens
cacattcctatccagtacaccatat

SEQ ID NO: 1390 - DNA, 25 bp, Homo sapiens
gcaaactgtgcggaactctcaacct

SEQ ID NO: 1391 - DNA, 25 bp, Homo sapiens
gggtaggtgttatagccactttata

SEQ ID NO: 1392 - DNA, 25 bp, Homo sapiens
tagccaggattgcagtctatgtctc

SEQ ID NO: 1393 - DNA, 25 bp, Homo sapiens
tatgtctcctgaattccagatccca

SEQ ID NO: 1394 - DNA, 25 bp, Homo sapiens
ttcatttcttattcaactctatggg

SEQ ID NO: 1395 - DNA, 25 bp, Homo sapiens
aagtcccattcttcctcaggatgtt

SEQ ID NO: 1396 - DNA, 25 bp, Homo sapiens
actgtcttattaccctgtcataggc

SEQ ID NO: 1397 - DNA, 25 bp, Homo sapiens
agacccttgtcttacaccataaaca

SEQ ID NO: 1398 - DNA, 25 bp, Homo sapiens
agagatcagaggtctgctggctccc

SEQ ID NO: 1399 - DNA, 25 bp, Homo sapiens
agcttgatattcactactgtcttat

SEQ ID NO: 1400 - DNA, 25 bp, Homo sapiens
atagtgttaccatcaaccaccttaa

SEQ ID NO: 1401 - DNA, 25 bp, Homo sapiens
atgtcccttaaggtgcttctggctc

SEQ ID NO: 1402 - DNA, 25 bp, Homo sapiens
gtcataggcccaccccaaatggaag

SEQ ID NO: 1403 - DNA, 25 bp, Homo sapiens
gtctgctttggaaggactgggctta

SEQ ID NO: 1404 - DNA, 25 bp, Homo sapiens
tctggctctgcagttattagcatag

SEQ ID NO: 1405 - DNA, 25 bp, Homo sapiens
tggctcccttatcatgtcccttaag

SEQ ID NO: 1406 - DNA, 25 bp, Homo sapiens
aatcactcagaggaggcgttgcatg

SEQ ID NO: 1407 - DNA, 25 bp, Homo sapiens
gagaatcgcctcaacactggaggtg

SEQ ID NO: 1408 - DNA, 25 bp, Homo sapiens
gataagaatgtcttcctaggccgga

SEQ ID NO: 1409 - DNA, 25 bp, Homo sapiens
gatgggataggaacaatcactcaga

SEQ ID NO: 1410 - DNA, 25 bp, Homo sapiens
taacaaatgaatatgtctgaacctc

SEQ ID NO: 1411 - DNA, 25 bp, Homo sapiens
taagaatgtcttcctaggccggatg

SEQ ID NO: 1412 - DNA, 25 bp, Homo sapiens
taatcgcagccccttggaaggccaa

SEQ ID NO: 1413 - DNA, 25 bp, Homo sapiens
tactacctttgcaaggagatgggat

SEQ ID NO: 1414 - DNA, 25 bp, Homo sapiens
tactttctactacctttgcaaggag

SEQ ID NO: 1415 - DNA, 25 bp, Homo sapiens
tcgcctcaacactggaggtggaggt

SEQ ID NO: 1416 - DNA, 25 bp, Homo sapiens
tctagagtttcagtctaagggaaaa

SEQ ID NO: 1417 - DNA, 25 bp, Homo sapiens
aagactcacatcctgctgttcttgc

SEQ ID NO: 1418 - DNA, 25 bp, Homo sapiens
agtgacgtgttctccaaataccagc

SEQ ID NO: 1419 - DNA, 25 bp, Homo sapiens
gagcaacttcaaaacagcagccgag

SEQ ID NO: 1420 - DNA, 25 bp, Homo sapiens
gaggccatcgatgacataccatttg

SEQ ID NO: 1421 - DNA, 25 bp, Homo sapiens
ggactttatcaaacacaaccagctg

SEQ ID NO: 1422 - DNA, 25 bp, Homo sapiens
gtttttgcaggcagcagaggccatc

SEQ ID NO: 1423 - DNA, 25 bp, Homo sapiens
ttcaagggcaagatcctgttcatct

SEQ ID NO: 1424 - DNA, 25 bp, Homo sapiens
ttctccaaataccagctcgacaaag

SEQ ID NO: 1425 - DNA, 25 bp, Homo sapiens
ttcttgcccaagagtgtgtctgact

SEQ ID NO: 1426 - DNA, 25 bp, Homo sapiens
ttgggatcacttccaacagtgacgt

SEQ ID NO: 1427 - DNA, 25 bp, Homo sapiens
ttgtcatcgagttcaccgagcagac

SEQ ID NO: 1428 - DNA, 25 bp, Homo sapiens
aaatggttgacctcacccaggtaat

SEQ ID NO: 1429 - DNA, 25 bp, Homo sapiens
aactgcattctatagattgacaaga

SEQ ID NO: 1430 - DNA, 25 bp, Homo sapiens
agtactgcaactgcattctatagat

SEQ ID NO: 1431 - DNA, 25 bp, Homo sapiens
ctgcaactgcattctatagattgac

SEQ ID NO: 1432 - DNA, 25 bp, Homo sapiens
gaaaaaatggttgacctcacccagg

SEQ ID NO: 1433 - DNA, 25 bp, Homo sapiens
gatgacagagtagaacgtgtacgca

SEQ ID NO: 1434 - DNA, 25 bp, Homo sapiens
gcaactgcattctatagattgacaa

SEQ ID NO: 1435 - DNA, 25 bp, Homo sapiens
ggatgatgaagtattcatggctttt

SEQ ID NO: 1436 - DNA, 25 bp, Homo sapiens
tactgcaactgcattctatagattg

SEQ ID NO: 1437 - DNA, 25 bp, Homo sapiens
tgacagagtagaacgtgtacgcaga

SEQ ID NO: 1438 - DNA, 25 bp, Homo sapiens
ttgacaagaaaggtttttgccaatc

SEQ ID NO: 1439 - DNA, 25 bp, Homo sapiens
aatgaatgcttcttgcaacacaaag

SEQ ID NO: 1440 - DNA, 25 bp, Homo sapiens
acacaaagatgacaacccaaacctc

SEQ ID NO: 1441 - DNA, 25 bp, Homo sapiens
accagaggttgatgtgatgtgcact

SEQ ID NO: 1442 - DNA, 25 bp, Homo sapiens
agaaatgaatgcttcttgcaacaca

SEQ ID NO: 1443 - DNA, 25 bp, Homo sapiens
aggttgatgtgatgtgcactgcttt

SEQ ID NO: 1444 - DNA, 25 bp, Homo sapiens
atgcttcttgcaacacaaagatgac

SEQ ID NO: 1445 - DNA, 25 bp, Homo sapiens
gaatgcttcttgcaacacaaagatg

SEQ ID NO: 1446 - DNA, 25 bp, Homo sapiens
gaccagaggttgatgtgatgtgcac

SEQ ID NO: 1447 - DNA, 25 bp, Homo sapiens
gaggttgatgtgatgtgcactgctt

SEQ ID NO: 1448 - DNA, 25 bp, Homo sapiens
gcttcttgcaacacaaagatgacaa

SEQ ID NO: 1449 - DNA, 25 bp, Homo sapiens
tgcaacacaaagatgacaacccaaa

SEQ ID NO: 1450 - DNA, 25 bp, Homo sapiens
agatccgaactacaccttcagctac

SEQ ID NO: 1451 - DNA, 25 bp, Homo sapiens
atatcagatccgaactacaccttca

SEQ ID NO: 1452 - DNA, 25 bp, Homo sapiens
ctattcttcagtatgcacagacctc

SEQ ID NO: 1453 - DNA, 25 bp, Homo sapiens
gacaaattcaggcagtactcagcaa

SEQ ID NO: 1454 - DNA, 25 bp, Homo sapiens
gcaaggtacaactattcttcagtat

SEQ ID NO: 1455 - DNA, 25 bp, Homo sapiens
gcacagatggagtacagggacttca

SEQ ID NO: 1456 - DNA, 25 bp, Homo sapiens
ggacagcagatacttgtgcccagca

SEQ ID NO: 1457 - DNA, 25 bp, Homo sapiens
gggacttcagacattaaccatgaca

SEQ ID NO: 1458 - DNA, 25 bp, Homo sapiens
ggtggtcgtacaaactgcatcagga

SEQ ID NO: 1459 - DNA, 25 bp, Homo sapiens
tgtgcccagcaatcaggtggtcgta

SEQ ID NO: 1460 - DNA, 25 bp, Homo sapiens
ttcaggcagtactcagcaaggtaca

SEQ ID NO: 1461 - DNA, 25 bp, Homo sapiens
aaattccaagtaccattgtcagtat

SEQ ID NO: 1462 - DNA, 25 bp, Homo sapiens
acactccttagttctttattcagca

SEQ ID NO: 1463 - DNA, 25 bp, Homo sapiens
agattccttataaggtgccttcata

SEQ ID NO: 1464 - DNA, 25 bp, Homo sapiens
attggcaagacaaagccccttacac

SEQ ID NO: 1465 - DNA, 25 bp, Homo sapiens
atttgttttaaccatcagccaagga

SEQ ID NO: 1466 - DNA, 25 bp, Homo sapiens
gaaaatcttatagtgctgtctcatt

SEQ ID NO: 1467 - DNA, 25 bp, Homo sapiens
gaaagcctgttgtgcaacccaatga

SEQ ID NO: 1468 - DNA, 25 bp, Homo sapiens
gcttccaccttctctaatcaaggaa

SEQ ID NO: 1469 - DNA, 25 bp, Homo sapiens
ggagtattggtgtggcatttcagca

SEQ ID NO: 1470 - DNA, 25 bp, Homo sapiens
gtctcttcaatatagttacacaggt

SEQ ID NO: 1471 - DNA, 25 bp, Homo sapiens
ttattcagcattgttctgctctcat

SEQ ID NO: 1472 - DNA, 25 bp, Homo sapiens
aaagctaagtcataacaagcataga

SEQ ID NO: 1473 - DNA, 25 bp, Homo sapiens
aatgtaatgtttaggatctctgcgc

SEQ ID NO: 1474 - DNA, 25 bp, Homo sapiens
aggatctctgcgctaggtcgtttac

SEQ ID NO: 1475 - DNA, 25 bp, Homo sapiens
aggtgtgtaaggacatttactttct

SEQ ID NO: 1476 - DNA, 25 bp, Homo sapiens
atgtttaggatctctgcgctaggtc

SEQ ID NO: 1477 - DNA, 25 bp, Homo sapiens
caagcatagacaaagcaccccaaat

SEQ ID NO: 1478 - DNA, 25 bp, Homo sapiens
gagtgcccttaagtggcaaaattta

SEQ ID NO: 1479 - DNA, 25 bp, Homo sapiens
gcaccccaaatgtttctctgaatgt

SEQ ID NO: 1480 - DNA, 25 bp, Homo sapiens
gctaggtcgtttaccgctatttatt

SEQ ID NO: 1481 - DNA, 25 bp, Homo sapiens
ggacatttactttctaaagctaagt

SEQ ID NO: 1482 - DNA, 25 bp, Homo sapiens
ggtgttacactatttgagtgccctt

SEQ ID NO: 1483 - DNA, 25 bp, Homo sapiens
cagcctatgtaacatgctgaacata

SEQ ID NO: 1484 - DNA, 25 bp, Homo sapiens
catagacttttatagaactgggagg

SEQ ID NO: 1485 - DNA, 25 bp, Homo sapiens
ccactgtgcctaaccaacaatataa

SEQ ID NO: 1486 - DNA, 25 bp, Homo sapiens
gataatctaacctagtggttgtggg

SEQ ID NO: 1487 - DNA, 25 bp, Homo sapiens
gattactcccaacaaacaatacttt

SEQ ID NO: 1488 - DNA, 25 bp, Homo sapiens
gggaacacagacttgtgccaccaca

SEQ ID NO: 1489 - DNA, 25 bp, Homo sapiens
gggaagatttatcaaattgtgtact

SEQ ID NO: 1490 - DNA, 25 bp, Homo sapiens
gggagggtccctggagataatctaa

SEQ ID NO: 1491 - DNA, 25 bp, Homo sapiens
gggtccctggagataatctaaccta

SEQ ID NO: 1492 - DNA, 25 bp, Homo sapiens
gtattatagctgattactcccaaca

SEQ ID NO: 1493 - DNA, 25 bp, Homo sapiens
tgtgtactttaaacattcagtatta

SEQ ID NO: 1494 - DNA, 25 bp, Homo sapiens
aaaattattatgtttcaagctgggc

SEQ ID NO: 1495 - DNA, 25 bp, Homo sapiens
aagcctgaggaactgaaagaaccat

SEQ ID NO: 1496 - DNA, 25 bp, Homo sapiens
atgacacactattgaatgcttctac

SEQ ID NO: 1497 - DNA, 25 bp, Homo sapiens
atgggcttaaaattcctctggaagg

SEQ ID NO: 1498 - DNA, 25 bp, Homo sapiens
atgtgctgtatccatttattagtat

SEQ ID NO: 1499 - DNA, 25 bp, Homo sapiens
cagaatgtttggacatgggcttaaa

SEQ ID NO: 1500 - DNA, 25 bp, Homo sapiens
gaatgcttctacttaattgtttcat

SEQ ID NO: 1501 - DNA, 25 bp, Homo sapiens
gcacttaattcaaatcttatcctaa

SEQ ID NO: 1502 - DNA, 25 bp, Homo sapiens
gtgccttattatttcattgacttac

SEQ ID NO: 1503 - DNA, 25 bp, Homo sapiens
tcttatcctaagtcacgcatcatta

SEQ ID NO: 1504 - DNA, 25 bp, Homo sapiens
ttgacttactgccaaatattaaagg

SEQ ID NO: 1505 - DNA, 25 bp, Homo sapiens
aactaccatgcccatgagatgttta

SEQ ID NO: 1506 - DNA, 25 bp, Homo sapiens
acagcaagacctatgaaacgatccg

SEQ ID NO: 1507 - DNA, 25 bp, Homo sapiens
accatgcccatgagatgtttatcaa

SEQ ID NO: 1508 - DNA, 25 bp, Homo sapiens
accttaaacagcaagacctatgaaa

SEQ ID NO: 1509 - DNA, 25 bp, Homo sapiens
caagacctatgaaacgatccggaac

SEQ ID NO: 1510 - DNA, 25 bp, Homo sapiens
cattaggaattttctgtcaactacc

SEQ ID NO: 1511 - DNA, 25 bp, Homo sapiens
cccattaggaattttctgtcaacta

SEQ ID NO: 1512 - DNA, 25 bp, Homo sapiens
gcaagacctatgaaacgatccggaa

SEQ ID NO: 1513 - DNA, 25 bp, Homo sapiens
taaacagcaagacctatgaaacgat

SEQ ID NO: 1514 - DNA, 25 bp, Homo sapiens
taaacccattaggaattttctgtca

SEQ ID NO: 1515 - DNA, 25 bp, Homo sapiens
taccatgcccatgagatgtttatca

SEQ ID NO: 1516 - DNA, 25 bp, Homo sapiens
aactgccattttagctatgtggtac

SEQ ID NO: 1517 - DNA, 25 bp, Homo sapiens
atagtctaaccactaggcgtgtccc

SEQ ID NO: 1518 - DNA, 25 bp, Homo sapiens
atttcctgatgtccatgtctatatg

SEQ ID NO: 1519 - DNA, 25 bp, Homo sapiens
cgatccggaaccgtctcactgtgga

SEQ ID NO: 1520 - DNA, 25 bp, Homo sapiens
gaccatttggtcctagagtctgctg

SEQ ID NO: 1521 - DNA, 25 bp, Homo sapiens
gcaaatgaccttcatatccactgat

SEQ ID NO: 1522 - DNA, 25 bp, Homo sapiens
ggaggaagccacagcatcagtgagt

SEQ ID NO: 1523 - DNA, 25 bp, Homo sapiens
ggcgtgtccctgttatcagcaaaga

SEQ ID NO: 1524 - DNA, 25 bp, Homo sapiens
gtacattcactctgtttcacgtatg

SEQ ID NO: 1525 - DNA, 25 bp, Homo sapiens
gtcctgtaatcagtgcatgtcctta

SEQ ID NO: 1526 - DNA, 25 bp, Homo sapiens
gtgcatgtccttagtctgttagtta

SEQ ID NO: 1527 - DNA, 25 bp, Homo sapiens
agtgaggaatcgagacttcccgcct

SEQ ID NO: 1528 - DNA, 25 bp, Homo sapiens
atgtcctcacctttcccagtgagga

SEQ ID NO: 1529 - DNA, 25 bp, Homo sapiens
caagcccgtctgcaatgttgtttga

SEQ ID NO: 1530 - DNA, 25 bp, Homo sapiens
cccgccttcgcgatggaactagaaa

SEQ ID NO: 1531 - DNA, 25 bp, Homo sapiens
gaaaagggtatgtagtcctggactt

SEQ ID NO: 1532 - DNA, 25 bp, Homo sapiens
gatgtaactatattccgaggaagag

SEQ ID NO: 1533 - DNA, 25 bp, Homo sapiens
ggaaattcttagctgtcgtagcaga

SEQ ID NO: 1534 - DNA, 25 bp, Homo sapiens
ggaattgattctgacctgtggcact

SEQ ID NO: 1535 - DNA, 25 bp, Homo sapiens
gtggaggcatccatgtcctcacctt

SEQ ID NO: 1536 - DNA, 25 bp, Homo sapiens
ttagccatgcaggtacattaattaa

SEQ ID NO: 1537 - DNA, 25 bp, Homo sapiens
tttaaaaatccacctccgcagaaga

SEQ ID NO: 1538 - DNA, 25 bp, Homo sapiens
aaaaatcagcgtttgtacccactca

SEQ ID NO: 1539 - DNA, 25 bp, Homo sapiens
aacctgctttctcgaaatgggccct

SEQ ID NO: 1540 - DNA, 25 bp, Homo sapiens
agccccatttcaagtataaccagga

SEQ ID NO: 1541 - DNA, 25 bp, Homo sapiens
atgtccacagagttcatgaggcccc

SEQ ID NO: 1542 - DNA, 25 bp, Homo sapiens
caagacctgtgtccgtccttccaag

SEQ ID NO: 1543 - DNA, 25 bp, Homo sapiens
caagctcaaccttcagagttcatga

SEQ ID NO: 1544 - DNA, 25 bp, Homo sapiens
gaatgtccacatttgaaacctccca

SEQ ID NO: 1545 - DNA, 25 bp, Homo sapiens
gacctccccggccaggatggaacgt

SEQ ID NO: 1546 - DNA, 25 bp, Homo sapiens
tcatgaggccccttgcccagaatgt

SEQ ID NO: 1547 - DNA, 25 bp, Homo sapiens
tggaacgttccagagacccattagt

SEQ ID NO: 1548 - DNA, 25 bp, Homo sapiens
tttgtacccactcaggctgccaaga

SEQ ID NO: 1549 - DNA, 25 bp, Homo sapiens
aatgcttaatccttagcaggctctt

SEQ ID NO: 1550 - DNA, 25 bp, Homo sapiens
attttttgggttgctggagttcatc

SEQ ID NO: 1551 - DNA, 25 bp, Homo sapiens
cagtgttgcctacaatagcaaaaat

SEQ ID NO: 1552 - DNA, 25 bp, Homo sapiens
cttagcaggctcttattctttaatt

SEQ ID NO: 1553 - DNA, 25 bp, Homo sapiens
ggagttcatctataagtcatttttg

SEQ ID NO: 1554 - DNA, 25 bp, Homo sapiens
gtagtctatctatatgatgcctatt

SEQ ID NO: 1555 - DNA, 25 bp, Homo sapiens
gtcttcaaaatctttaatgactgat

SEQ ID NO: 1556 - DNA, 25 bp, Homo sapiens
taagactatcaaacacagtgttgcc

SEQ ID NO: 1557 - DNA, 25 bp, Homo sapiens
tatgatgcctatttttaggctttaa

SEQ ID NO: 1558 - DNA, 25 bp, Homo sapiens
ttctttaattaaacgtgcctttgag

SEQ ID NO: 1559 - DNA, 25 bp, Homo sapiens
tttgggttgctggagttcatctata

SEQ ID NO: 1560 - DNA, 25 bp, Homo sapiens
aatgaggggcttcacgagaggccac

SEQ ID NO: 1561 - DNA, 25 bp, Homo sapiens
acacttgctcctgttggtccctgtc

SEQ ID NO: 1562 - DNA, 25 bp, Homo sapiens
acccattgaagtctccttgggccac

SEQ ID NO: 1563 - DNA, 25 bp, Homo sapiens
acttgctcctgttggtccctgtcct

SEQ ID NO: 1564 - DNA, 25 bp, Homo sapiens
aggaaggcacacttgctcctgttgg

SEQ ID NO: 1565 - DNA, 25 bp, Homo sapiens
atgaggggcttcacgagaggccaca

SEQ ID NO: 1566 - DNA, 25 bp, Homo sapiens
cacccattgaagtctccttgggcca

SEQ ID NO: 1567 - DNA, 25 bp, Homo sapiens
ccattgaagtctccttgggccacca

SEQ ID NO: 1568 - DNA, 25 bp, Homo sapiens
gggccctgaggaaggcacacttgct

SEQ ID NO: 1569 - DNA, 25 bp, Homo sapiens
gttggtccctgtccttgctgcccag

SEQ ID NO: 1570 - DNA, 25 bp, Homo sapiens
tcaagcctgtctcaccagtggcctg

SEQ ID NO: 1571 - DNA, 25 bp, Homo sapiens
tcacgagaggccacagggcctggct

SEQ ID NO: 1572 - DNA, 25 bp, Homo sapiens
tctccttgggccaccaaaggtggtg

SEQ ID NO: 1573 - DNA, 25 bp, Homo sapiens
tgctcctgttggtccctgtccttgc

SEQ ID NO: 1574 - DNA, 25 bp, Homo sapiens
tgttggtccctgtccttgctgccca

SEQ ID NO: 1575 - DNA, 25 bp, Homo sapiens
ttgaagtctccttgggccaccaaag

SEQ ID NO: 1576 - DNA, 25 bp, Homo sapiens
aacctctgggcagcacagcgctatg

SEQ ID NO: 1577 - DNA, 25 bp, Homo sapiens
acagcgctatggccgcgagctccgg

SEQ ID NO: 1578 - DNA, 25 bp, Homo sapiens
agcacagcgctatggccgcgagctc

SEQ ID NO: 1579 - DNA, 25 bp, Homo sapiens
atgagtgacgagtttgtggactcct

SEQ ID NO: 1580 - DNA, 25 bp, Homo sapiens
caacctctgggcagcacagcgctat

SEQ ID NO: 1581 - DNA, 25 bp, Homo sapiens
cctctgggcagcacagcgctatggc

SEQ ID NO: 1582 - DNA, 25 bp, Homo sapiens
cgagtttgtggactcctttaagaag

SEQ ID NO: 1583 - DNA, 25 bp, Homo sapiens
ctatggccgcgagctccggaggatg

SEQ ID NO: 1584 - DNA, 25 bp, Homo sapiens
gagtttgtggactcctttaagaagg

SEQ ID NO: 1585 - DNA, 25 bp, Homo sapiens
gatgagtgacgagtttgtggactcc

SEQ ID NO: 1586 - DNA, 25 bp, Homo sapiens
gcagcacagcgctatggccgcgagc

SEQ ID NO: 1587 - DNA, 25 bp, Homo sapiens
gctccggaggatgagtgacgagttt

SEQ ID NO: 1588 - DNA, 25 bp, Homo sapiens
tatggccgcgagctccggaggatga

SEQ ID NO: 1589 - DNA, 25 bp, Homo sapiens
tgacgagtttgtggactcctttaag

SEQ ID NO: 1590 - DNA, 25 bp, Homo sapiens
tgggcagcacagcgctatggccgcg

SEQ ID NO: 1591 - DNA, 25 bp, Homo sapiens
tgtggactcctttaagaagggactt

SEQ ID NO: 1592 - DNA, 25 bp, Homo sapiens
aactaacatgtcctgcctattatct

SEQ ID NO: 1593 - DNA, 25 bp, Homo sapiens
acttcagggctttactccgtaacag

SEQ ID NO: 1594 - DNA, 25 bp, Homo sapiens
agtgccacttaatgtatgttaccaa

SEQ ID NO: 1595 - DNA, 25 bp, Homo sapiens
attatctgtcagctgcaaggtactc

SEQ ID NO: 1596 - DNA, 25 bp, Homo sapiens
gacacaccaggcgctaattcaagga

SEQ ID NO: 1597 - DNA, 25 bp, Homo sapiens
gatttcctaatactgtcatcctcaa

SEQ ID NO: 1598 - DNA, 25 bp, Homo sapiens
gcaaggtactctggtgagtcaccac

SEQ ID NO: 1599 - DNA, 25 bp, Homo sapiens
ggaatttcttaacttcttgcttctt

SEQ ID NO: 1600 - DNA, 25 bp, Homo sapiens
gtccttttgacactgctctaacagc

SEQ ID NO: 1601 - DNA, 25 bp, Homo sapiens
gttacagttctgtggtttcatgtta

SEQ ID NO: 1602 - DNA, 25 bp, Homo sapiens
tattaacgatgtccaacccgtctgg

SEQ ID NO: 1603 - DNA, 25 bp, Homo sapiens
aattttctgcaggatgattgtacag

SEQ ID NO: 1604 - DNA, 25 bp, Homo sapiens
acccttcttttaagatgtgtcttca

SEQ ID NO: 1605 - DNA, 25 bp, Homo sapiens
acttttctttgaaggatgactacag

SEQ ID NO: 1606 - DNA, 25 bp, Homo sapiens
caattttctttaaccagtctgaagt

SEQ ID NO: 1607 - DNA, 25 bp, Homo sapiens
catgatcgctttctacactgtatta

SEQ ID NO: 1608 - DNA, 25 bp, Homo sapiens
ctggacaaacccttcttttaagatg

SEQ ID NO: 1609 - DNA, 25 bp, Homo sapiens
gaattctccaaaacaattttctgca

SEQ ID NO: 1610 - DNA, 25 bp, Homo sapiens
gatcgctttctacactgtattacat

SEQ ID NO: 1611 - DNA, 25 bp, Homo sapiens
gattgtacagaatcattgcttatga

SEQ ID NO: 1612 - DNA, 25 bp, Homo sapiens
taaccagtctgaagtttcatttatg

SEQ ID NO: 1613 - DNA, 25 bp, Homo sapiens
tgcttatgacatgatcgctttctac

SEQ ID NO: 1614 - DNA, 25 bp, Homo sapiens
actactgatgaatcgtcctcgtgct

SEQ ID NO: 1615 - DNA, 25 bp, Homo sapiens
agtgggaacgtcttacggtagctga

SEQ ID NO: 1616 - DNA, 25 bp, Homo sapiens
attgcaccattttcaatttggagca

SEQ ID NO: 1617 - DNA, 25 bp, Homo sapiens
atttgaacgtgttcttggcccatgc

SEQ ID NO: 1618 - DNA, 25 bp, Homo sapiens
attttagaggggtcagctgctgtgc

SEQ ID NO: 1619 - DNA, 25 bp, Homo sapiens
ccaatccatgcttcactcatgcaaa

SEQ ID NO: 1620 - DNA, 25 bp, Homo sapiens
gcttcactcatgcaaactgctttat

SEQ ID NO: 1621 - DNA, 25 bp, Homo sapiens
gtagctgatgcattggaaccagtgc

SEQ ID NO: 1622 - DNA, 25 bp, Homo sapiens
tgaagtgcgttaagctggaccgacc

SEQ ID NO: 1623 - DNA, 25 bp, Homo sapiens
tgctgtgctacaacgtcggtcagaa

SEQ ID NO: 1624 - DNA, 25 bp, Homo sapiens
tggaccgacctagatttgaacgtgt

SEQ ID NO: 1625 - DNA, 25 bp, Homo sapiens
actcttcgatgtacttgtttggttt

SEQ ID NO: 1626 - DNA, 25 bp, Homo sapiens
ataacccatatactcttcgatgtac

SEQ ID NO: 1627 - DNA, 25 bp, Homo sapiens
attttagtcattctgcttctcatct

SEQ ID NO: 1628 - DNA, 25 bp, Homo sapiens
cgaacttaggatttgtttcttctct

SEQ ID NO: 1629 - DNA, 25 bp, Homo sapiens
ctttttatcttcttagctcatctta

SEQ ID NO: 1630 - DNA, 25 bp, Homo sapiens
gacagcggcaatcttttctttggtc

SEQ ID NO: 1631 - DNA, 25 bp, Homo sapiens
ggatgcagtgcgtctgaagtgctaa

SEQ ID NO: 1632 - DNA, 25 bp, Homo sapiens
gtaaaggctgttctggctttttatc

SEQ ID NO: 1633 - DNA, 25 bp, Homo sapiens
taggagaaaattaccctcccagcac

SEQ ID NO: 1634 - DNA, 25 bp, Homo sapiens
tcttctcttctgtgtttcgattttt

SEQ ID NO: 1635 - DNA, 25 bp, Homo sapiens
tggaatgagtctcctttagtttcag

SEQ ID NO: 1636 - DNA, 25 bp, Homo sapiens
aagacaacttgcaccactaagaaaa

SEQ ID NO: 1637 - DNA, 25 bp, Homo sapiens
agaatactcattgcagcagccttcc

SEQ ID NO: 1638 - DNA, 25 bp, Homo sapiens
agagattgacttcctaagctactta

SEQ ID NO: 1639 - DNA, 25 bp, Homo sapiens
agctgtgttcactcttttatacaaa

SEQ ID NO: 1640 - DNA, 25 bp, Homo sapiens
atgttcctgttggtatagactatgt

SEQ ID NO: 1641 - DNA, 25 bp, Homo sapiens
ccatatcagcccaatgttcctgttg

SEQ ID NO: 1642 - DNA, 25 bp, Homo sapiens
gaatggcaacagacagaagtacttt

SEQ ID NO: 1643 - DNA, 25 bp, Homo sapiens
gatgtctgttcatgtgttaagtgtt

SEQ ID NO: 1644 - DNA, 25 bp, Homo sapiens
gctacttaagacaacttgcaccact

SEQ ID NO: 1645 - DNA, 25 bp, Homo sapiens
gggttttactgtaagctgtgttcac

SEQ ID NO: 1646 - DNA, 25 bp, Homo sapiens
gtttttgttttatcagaatggcaac

SEQ ID NO: 1647 - DNA, 25 bp, Homo sapiens
aacattccagctgatatcgtctttg

SEQ ID NO: 1648 - DNA, 25 bp, Homo sapiens
aatatagctatctgagctccccaag

SEQ ID NO: 1649 - DNA, 25 bp, Homo sapiens
cagcctccgggaggctctgtgtggc

SEQ ID NO: 1650 - DNA, 25 bp, Homo sapiens
cccactctggacggcaggacgatac

SEQ ID NO: 1651 - DNA, 25 bp, Homo sapiens
ccgtacttgagcaggttcttccaat

SEQ ID NO: 1652 - DNA, 25 bp, Homo sapiens
ggacctttctaccagttgtggacca

SEQ ID NO: 1653 - DNA, 25 bp, Homo sapiens
ggattccccagacatcaagaaccgt

SEQ ID NO: 1654 - DNA, 25 bp, Homo sapiens
ggcccagggagggctttcgtactgc

SEQ ID NO: 1655 - DNA, 25 bp, Homo sapiens
tggctctgatgtcatttatcctgcc

SEQ ID NO: 1656 - DNA, 25 bp, Homo sapiens
tgtgtggctgcacagtgaacgtccc

SEQ ID NO: 1657 - DNA, 25 bp, Homo sapiens
ttatcaggcctggcatgcggcgaaa

SEQ ID NO: 1658 - DNA, 25 bp, Homo sapiens
aagcaacttttccatgctcttaatg

SEQ ID NO: 1659 - DNA, 25 bp, Homo sapiens
atacggaggtcttgtgtatctgtgg

SEQ ID NO: 1660 - DNA, 25 bp, Homo sapiens
cagggagtttccttattcactcttt

SEQ ID NO: 1661 - DNA, 25 bp, Homo sapiens
ccatctctgtctaggggtcacaaat

SEQ ID NO: 1662 - DNA, 25 bp, Homo sapiens
gaaatggctcctgtatcacatacgg

SEQ ID NO: 1663 - DNA, 25 bp, Homo sapiens
gctcttaatgtattcctttttagta

SEQ ID NO: 1664 - DNA, 25 bp, Homo sapiens
ggcaacagggagtttccttattcac

SEQ ID NO: 1665 - DNA, 25 bp, Homo sapiens
ggctcctgtatcacatacggaggtc

SEQ ID NO: 1666 - DNA, 25 bp, Homo sapiens
gtgtatctgtggcaacagggagttt

SEQ ID NO: 1667 - DNA, 25 bp, Homo sapiens
tggaaaagcacttgccatctctgtc

SEQ ID NO: 1668 - DNA, 25 bp, Homo sapiens
tttccatgctcttaatgtattcctt

SEQ ID NO: 1669 - DNA, 25 bp, Homo sapiens
aatcgtgtgtccgtggaaccagtcc

SEQ ID NO: 1670 - DNA, 25 bp, Homo sapiens
aatgccatcactggaatttcccacc

SEQ ID NO: 1671 - DNA, 25 bp, Homo sapiens
cattctgtttgtctcgtggggggag

SEQ ID NO: 1672 - DNA, 25 bp, Homo sapiens
ccctgccactttgcatggtttgatt

SEQ ID NO: 1673 - DNA, 25 bp, Homo sapiens
ggggcactgcctgaaggcgagtgtg

SEQ ID NO: 1674 - DNA, 25 bp, Homo sapiens
ggtcccccacgtgtgaagtgtagtg

SEQ ID NO: 1675 - DNA, 25 bp, Homo sapiens
gtcctgcggaaatgtgtcttgtctt

SEQ ID NO: 1676 - DNA, 25 bp, Homo sapiens
tagccgcgtgtgacagtcttgcatt

SEQ ID NO: 1677 - DNA, 25 bp, Homo sapiens
tggcatcgcatcgtggtgtgtcaat

SEQ ID NO: 1678 - DNA, 25 bp, Homo sapiens
tgggcatagcattagctgcttcctc

SEQ ID NO: 1679 - DNA, 25 bp, Homo sapiens
tgttgataatatctctcacccggat

SEQ ID NO: 1680 - DNA, 25 bp, Homo sapiens
aacaggatgagacacagaccaagat

SEQ ID NO: 1681 - DNA, 25 bp, Homo sapiens
aggtgcagaatctcggcggggagct

SEQ ID NO: 1682 - DNA, 25 bp, Homo sapiens
cagtcactgttcgtcactcaaatga

SEQ ID NO: 1683 - DNA, 25 bp, Homo sapiens
gaaccagtccaggtggtgaattttc

SEQ ID NO: 1684 - DNA, 25 bp, Homo sapiens
gaatctcggcggggagcttgttgtc

SEQ ID NO: 1685 - DNA, 25 bp, Homo sapiens
gatccaggcagccaagaacttgatg

SEQ ID NO: 1686 - DNA, 25 bp, Homo sapiens
ggaaatgggcagactgaaccagtcc

SEQ ID NO: 1687 - DNA, 25 bp, Homo sapiens
ggctcctgaatatcagtcactgttc

SEQ ID NO: 1688 - DNA, 25 bp, Homo sapiens
tacaacactgatactagattccaca

SEQ ID NO: 1689 - DNA, 25 bp, Homo sapiens
tggacagcatctaagtctgcccagg

SEQ ID NO: 1690 - DNA, 25 bp, Homo sapiens
aattcatcattgggctcacttctaa

SEQ ID NO: 1691 - DNA, 25 bp, Homo sapiens
gaccaagccgagatgccattctctt

SEQ ID NO: 1692 - DNA, 25 bp, Homo sapiens
gacctgtggtaagcaacctggcatc

SEQ ID NO: 1693 - DNA, 25 bp, Homo sapiens
gctacagtgtctcgatgccataatc

SEQ ID NO: 1694 - DNA, 25 bp, Homo sapiens
gtccagacagcttgactgcttttaa

SEQ ID NO: 1695 - DNA, 25 bp, Homo sapiens
gttgagagggtgcagtccagacagc

SEQ ID NO: 1696 - DNA, 25 bp, Homo sapiens
tcagaacacactttttttcctcttt

SEQ ID NO: 1697 - DNA, 25 bp, Homo sapiens
ttactaatgtacgctgctgcaggac

SEQ ID NO: 1698 - DNA, 25 bp, Homo sapiens
ttctcttagtgatggcggcgttagg

SEQ ID NO: 1699 - DNA, 25 bp, Homo sapiens
tttctcccagcttcaaatgcacaat

SEQ ID NO: 1700 - DNA, 25 bp, Homo sapiens
aaagttttcacgtcatcgtttcctg

SEQ ID NO: 1701 - DNA, 25 bp, Homo sapiens
agcaagtctcaggccacaatggggt

SEQ ID NO: 1702 - DNA, 25 bp, Homo sapiens
caactgtggaccttttatatgtgcc

SEQ ID NO: 1703 - DNA, 25 bp, Homo sapiens
gatgataccttaattacactcccgc

SEQ ID NO: 1704 - DNA, 25 bp, Homo sapiens
ggctgctgcagaatgctggttgaca

SEQ ID NO: 1705 - DNA, 25 bp, Homo sapiens
gtggctacatcctaacatatgcatt

SEQ ID NO: 1706 - DNA, 25 bp, Homo sapiens
gtttcctggctagttcatttcatta

SEQ ID NO: 1707 - DNA, 25 bp, Homo sapiens
tatactgctatttttccctgaattc

SEQ ID NO: 1708 - DNA, 25 bp, Homo sapiens
tattgtctagctccagttatctgta

SEQ ID NO: 1709 - DNA, 25 bp, Homo sapiens
tcactttagctgtttgccttactct

SEQ ID NO: 1710 - DNA, 25 bp, Homo sapiens
ttctcctccacctgtgtggtatatt

SEQ ID NO: 1711 - DNA, 25 bp, Homo sapiens
aaaagcgaggtggccatgttatgct

SEQ ID NO: 1712 - DNA, 25 bp, Homo sapiens
acaacgcattgccacggaaacatac

SEQ ID NO: 1713 - DNA, 25 bp, Homo sapiens
agatgctgtcattagtctatatggt

SEQ ID NO: 1714 - DNA, 25 bp, Homo sapiens
agcattttgggatccttcagcacag

SEQ ID NO: 1715 - DNA, 25 bp, Homo sapiens
atgtccaccatgaacttgatacgtc

SEQ ID NO: 1716 - DNA, 25 bp, Homo sapiens
ctgacctacctcaaagggcagtttt

SEQ ID NO: 1717 - DNA, 25 bp, Homo sapiens
gaagctaattgtactaatctgagat

SEQ ID NO: 1718 - DNA, 25 bp, Homo sapiens
ggaattctcaagacctgagtatttt

SEQ ID NO: 1719 - DNA, 25 bp, Homo sapiens
gggcagttttgaggcatgactaatg

SEQ ID NO: 1720 - DNA, 25 bp, Homo sapiens
taactataaggtgcctcagttttcc

SEQ ID NO: 1721 - DNA, 25 bp, Homo sapiens
tgaacttgatacgtccgtgtgtccc

SEQ ID NO: 1722 - DNA, 25 bp, Homo sapiens
aacatctaaggcatttctcttctcc

SEQ ID NO: 1723 - DNA, 25 bp, Homo sapiens
aagagtgatctacgtcatctcaggg

SEQ ID NO: 1724 - DNA, 25 bp, Homo sapiens
aaggctgtgtatagtccatttccca

SEQ ID NO: 1725 - DNA, 25 bp, Homo sapiens
atagtccatttcccaggtctgagat

SEQ ID NO: 1726 - DNA, 25 bp, Homo sapiens
atcgtggagctgtaggtgccttatt

SEQ ID NO: 1727 - DNA, 25 bp, Homo sapiens
ctcttctcccctagaaggctgtgta

SEQ ID NO: 1728 - DNA, 25 bp, Homo sapiens
cttcggccctagactctacaaatgt

SEQ ID NO: 1729 - DNA, 25 bp, Homo sapiens
gatttaccgcattgtttctcagaag

SEQ ID NO: 1730 - DNA, 25 bp, Homo sapiens
ggtgcagtgctgtcagaacatctaa

SEQ ID NO: 1731 - DNA, 25 bp, Homo sapiens
gtcattcattgaaacttcggcccta

SEQ ID NO: 1732 - DNA, 25 bp, Homo sapiens
tgtggttcctattcatgttccacca

SEQ ID NO: 1733 - DNA, 25 bp, Homo sapiens
actgatacaattgttgacttttctt

SEQ ID NO: 1734 - DNA, 25 bp, Homo sapiens
attgttttgatcatatgcatgtatg

SEQ ID NO: 1735 - DNA, 25 bp, Homo sapiens
caactcagtgaaaagatggtctcca

SEQ ID NO: 1736 - DNA, 25 bp, Homo sapiens
gaaaagcctttttcaacatatccct

SEQ ID NO: 1737 - DNA, 25 bp, Homo sapiens
gaaataccccaaacatgaaaagatt

SEQ ID NO: 1738 - DNA, 25 bp, Homo sapiens
gaacactaggtggcactcagttatc

SEQ ID NO: 1739 - DNA, 25 bp, Homo sapiens
gaagtcatatacatgtaagctacaa

SEQ ID NO: 1740 - DNA, 25 bp, Homo sapiens
gtaagcttagtagttgcagaaattg

SEQ ID NO: 1741 - DNA, 25 bp, Homo sapiens
gtggcactcagttatcttaacaggg

SEQ ID NO: 1742 - DNA, 25 bp, Homo sapiens
tactatgtgtaagaaataccccaaa

SEQ ID NO: 1743 - DNA, 25 bp, Homo sapiens
tttttcaacatatccctaagctaag

SEQ ID NO: 1744 - DNA, 25 bp, Homo sapiens
aatcctcataagaaaccagccttga

SEQ ID NO: 1745 - DNA, 25 bp, Homo sapiens
aatcttgggctgttaaatcctagga

SEQ ID NO: 1746 - DNA, 25 bp, Homo sapiens
acacgtggtttgtctggagagtttc

SEQ ID NO: 1747 - DNA, 25 bp, Homo sapiens
atactacttggaggaattcttctac

SEQ ID NO: 1748 - DNA, 25 bp, Homo sapiens
atagcacagctcaaacattagtttt

SEQ ID NO: 1749 - DNA, 25 bp, Homo sapiens
attcagctataaccccagttcatgt

SEQ ID NO: 1750 - DNA, 25 bp, Homo sapiens
ctcttcattggtattctaaacctcc

SEQ ID NO: 1751 - DNA, 25 bp, Homo sapiens
gaggtagtaacagcccaatcttggg

SEQ ID NO: 1752 - DNA, 25 bp, Homo sapiens
ttacctcctctaacacgtggtttgt

SEQ ID NO: 1753 - DNA, 25 bp, Homo sapiens
ttactggtgattgttcttgctgagg

SEQ ID NO: 1754 - DNA, 25 bp, Homo sapiens
ttttgcttatacactctgattccta

SEQ ID NO: 1755 - DNA, 25 bp, Homo sapiens
aaagcagactgatttgtttctaaga

SEQ ID NO: 1756 - DNA, 25 bp, Homo sapiens
acattttacattccatcttttctga

SEQ ID NO: 1757 - DNA, 25 bp, Homo sapiens
agatattcccttgagattttgatac

SEQ ID NO: 1758 - DNA, 25 bp, Homo sapiens
cacggaatctgattaagccctggcc

SEQ ID NO: 1759 - DNA, 25 bp, Homo sapiens
gaagaccatgtctactaattacaaa

SEQ ID NO: 1760 - DNA, 25 bp, Homo sapiens
gagatgttaagcccactttgttctt

SEQ ID NO: 1761 - DNA, 25 bp, Homo sapiens
gtcctacaatttggattttgatcat

SEQ ID NO: 1762 - DNA, 25 bp, Homo sapiens
tccagttacctagatattcccttga

SEQ ID NO: 1763 - DNA, 25 bp, Homo sapiens
tctgattaagccctggcctcttgat

SEQ ID NO: 1764 - DNA, 25 bp, Homo sapiens
tcttttctgaagattgtcctacaat

SEQ ID NO: 1765 - DNA, 25 bp, Homo sapiens
ttcctaccacttccagtaagaaaat

SEQ ID NO: 1766 - DNA, 25 bp, Homo sapiens
acaaatgcaagctcaccaaggtccc

SEQ ID NO: 1767 - DNA, 25 bp, Homo sapiens
acacaaatgcaagctcaccaaggtc

SEQ ID NO: 1768 - DNA, 25 bp, Homo sapiens
agtgcgtgccgagctgaggcagatg

SEQ ID NO: 1769 - DNA, 25 bp, Homo sapiens
cagagccctgggctatagtctctga

SEQ ID NO: 1770 - DNA, 25 bp, Homo sapiens
cccacacaaatgcaagctcaccaag

SEQ ID NO: 1771 - DNA, 25 bp, Homo sapiens
ccccagagccctgggctatagtctc

SEQ ID NO: 1772 - DNA, 25 bp, Homo sapiens
cctcaaacatggcgccaaggataaa

SEQ ID NO: 1773 - DNA, 25 bp, Homo sapiens
gcatcctcaaacatggcgccaagga

SEQ ID NO: 1774 - DNA, 25 bp, Homo sapiens
gcgtgccgagctgaggcagatgttc

SEQ ID NO: 1775 - DNA, 25 bp, Homo sapiens
tcccagttcccagtggaagaaacag

SEQ ID NO: 1776 - DNA, 25 bp, Homo sapiens
tgccgagctgaggcagatgttccca

SEQ ID NO: 1777 - DNA, 25 bp, Homo sapiens
atctgaattcctgtaggcacaccct

SEQ ID NO: 1778 - DNA, 25 bp, Homo sapiens
atttgtggccactcactttgtagga

SEQ ID NO: 1779 - DNA, 25 bp, Homo sapiens
catccttgctttaccacaatgagca

SEQ ID NO: 1780 - DNA, 25 bp, Homo sapiens
ccaggacaccgctgtcctggcattt

SEQ ID NO: 1781 - DNA, 25 bp, Homo sapiens
cctgaggtgcattttctcatcatcc

SEQ ID NO: 1782 - DNA, 25 bp, Homo sapiens
gaaactcatctccttcctgaggagc

SEQ ID NO: 1783 - DNA, 25 bp, Homo sapiens
gaaggtcacgtggaaatgtctcggg

SEQ ID NO: 1784 - DNA, 25 bp, Homo sapiens
gcacaccctccatagggtatgattt

SEQ ID NO: 1785 - DNA, 25 bp, Homo sapiens
gtaggcacaccctccatagggtatg

SEQ ID NO: 1786 - DNA, 25 bp, Homo sapiens
gtggaaatgtctcgggacttgggtc

SEQ ID NO: 1787 - DNA, 25 bp, Homo sapiens
tgtgtctttccagaaggtcacgtgg

SEQ ID NO: 1788 - DNA, 25 bp, Homo sapiens
agccttgggtcatttgctcagtgtc

SEQ ID NO: 1789 - DNA, 25 bp, Homo sapiens
caactgttttaagtcctcattttct

SEQ ID NO: 1790 - DNA, 25 bp, Homo sapiens
gcagaagatgggcctccagaactcc

SEQ ID NO: 1791 - DNA, 25 bp, Homo sapiens
gtagcagggtattgcctttgattca

SEQ ID NO: 1792 - DNA, 25 bp, Homo sapiens
gtcacgacatccgaactggagggac

SEQ ID NO: 1793 - DNA, 25 bp, Homo sapiens
gtgagctgttgcgtactgtatcata

SEQ ID NO: 1794 - DNA, 25 bp, Homo sapiens
tattcatggaggacacactgctaag

SEQ ID NO: 1795 - DNA, 25 bp, Homo sapiens
tggggtggcttatggcttctttatc

SEQ ID NO: 1796 - DNA, 25 bp, Homo sapiens
ttagctggaaccccaatgagccttg

SEQ ID NO: 1797 - DNA, 25 bp, Homo sapiens
ttatcctctgattctagcactttca

SEQ ID NO: 1798 - DNA, 25 bp, Homo sapiens
tttctcaaactaagtgcttgctgtt

SEQ ID NO: 1799 - DNA, 25 bp, Homo sapiens
accagctgcctcccaaaggaggggc

SEQ ID NO: 1800 - DNA, 25 bp, Homo sapiens
aggggcagccgtgcttatattttta

SEQ ID NO: 1801 - DNA, 25 bp, Homo sapiens
atctttgttgagagtcttcgtgact

SEQ ID NO: 1802 - DNA, 25 bp, Homo sapiens
gacaaagactggcttctggacttcc

SEQ ID NO: 1803 - DNA, 25 bp, Homo sapiens
gcgtaaagactatccatgtcatctt

SEQ ID NO: 1804 - DNA, 25 bp, Homo sapiens
ggcgttagctgattaacccatgtaa

SEQ ID NO: 1805 - DNA, 25 bp, Homo sapiens
ggtggcttcattctagatgtagctt

SEQ ID NO: 1806 - DNA, 25 bp, Homo sapiens
taccatctcagtgagcaccagctgc

SEQ ID NO: 1807 - DNA, 25 bp, Homo sapiens
tatcaacctaactaaaacattcctt

SEQ ID NO: 1808 - DNA, 25 bp, Homo sapiens
tcatgatgctgactggcgttagctg

SEQ ID NO: 1809 - DNA, 25 bp, Homo sapiens
tgccattgcctggtcacattgaaat

SEQ ID NO: 1810 - DNA, 25 bp, Homo sapiens
aaaggcttctagttagctgctttaa

SEQ ID NO: 1811 - DNA, 25 bp, Homo sapiens
aagttcccacctgaagagactctga

SEQ ID NO: 1812 - DNA, 25 bp, Homo sapiens
aatgccaccatctccgtggaaggaa

SEQ ID NO: 1813 - DNA, 25 bp, Homo sapiens
ctcagctccaggctatctggcaata

SEQ ID NO: 1814 - DNA, 25 bp, Homo sapiens
gaaagtggcagttccttacagccct

SEQ ID NO: 1815 - DNA, 25 bp, Homo sapiens
gagatcaccgtggagcttagctgtg

SEQ ID NO: 1816 - DNA, 25 bp, Homo sapiens
gccctgctgctggggttgattttga

SEQ ID NO: 1817 - DNA, 25 bp, Homo sapiens
ggagattgcttatacctggaaacta

SEQ ID NO: 1818 - DNA, 25 bp, Homo sapiens
ggatttgtccgagaccttcaaggta

SEQ ID NO: 1819 - DNA, 25 bp, Homo sapiens
ggtaacccaattgcgaatgccacca

SEQ ID NO: 1820 - DNA, 25 bp, Homo sapiens
taacaaaaactccctcattagctac

SEQ ID NO: 1821 - DNA, 25 bp, Homo sapiens
aaggactcctaactactttgcatct

SEQ ID NO: 1822 - DNA, 25 bp, Homo sapiens
aagggcttgtttggtatcccactga

SEQ ID NO: 1823 - DNA, 25 bp, Homo sapiens
attgcatccttagccattgtcacaa

SEQ ID NO: 1824 - DNA, 25 bp, Homo sapiens
gaaacatttatggcctcaagatact

SEQ ID NO: 1825 - DNA, 25 bp, Homo sapiens
gcatctgtaatccacaaagattctg

SEQ ID NO: 1826 - DNA, 25 bp, Homo sapiens
ggcgttaggatgttgctttcttttt

SEQ ID NO: 1827 - DNA, 25 bp, Homo sapiens
gtctcttctctgtattatcatagtc

SEQ ID NO: 1828 - DNA, 25 bp, Homo sapiens
gttctctgtatttatgcagctgatt

SEQ ID NO: 1829 - DNA, 25 bp, Homo sapiens
tactatacatttaaagcaccccaat

SEQ ID NO: 1830 - DNA, 25 bp, Homo sapiens
tcttcctcattgtagggcgttagga

SEQ ID NO: 1831 - DNA, 25 bp, Homo sapiens
tcttgtgtcttatgttctctgtatt

SEQ ID NO: 1832 - DNA, 25 bp, Homo sapiens
aattgtcttgatttttcggcagttc

SEQ ID NO: 1833 - DNA, 25 bp, Homo sapiens
atagctttactgtttctcaagtgtt

SEQ ID NO: 1834 - DNA, 25 bp, Homo sapiens
atcaaccctgcaatcactttttgga

SEQ ID NO: 1835 - DNA, 25 bp, Homo sapiens
atcttgatttggatctctttttatt

SEQ ID NO: 1836 - DNA, 25 bp, Homo sapiens
catttgcccaattccaggtgtgcac

SEQ ID NO: 1837 - DNA, 25 bp, Homo sapiens
gatccgtggtttgtactcaaagccc

SEQ ID NO: 1838 - DNA, 25 bp, Homo sapiens
ggaggagtctcaacatgtgtttctg

SEQ ID NO: 1839 - DNA, 25 bp, Homo sapiens
gggtagggggtagtgaggatcttga

SEQ ID NO: 1840 - DNA, 25 bp, Homo sapiens
gtgtttctgacacaagatccgtggt

SEQ ID NO: 1841 - DNA, 25 bp, Homo sapiens
tgtgtgggtgctgataattgtgtat

SEQ ID NO: 1842 - DNA, 25 bp, Homo sapiens
tttttcggcagttcaagctatatcg

SEQ ID NO: 1843 - DNA, 25 bp, Homo sapiens
aaagggatacttttatgcaaccata

SEQ ID NO: 1844 - DNA, 25 bp, Homo sapiens
aaaggtgcccttattgaacattcta

SEQ ID NO: 1845 - DNA, 25 bp, Homo sapiens
aactcctgaaatgccaagtgcctgc

SEQ ID NO: 1846 - DNA, 25 bp, Homo sapiens
agtagctttggaaaggtgcccttat

SEQ ID NO: 1847 - DNA, 25 bp, Homo sapiens
caagtgcctgcttagtagctttgga

SEQ ID NO: 1848 - DNA, 25 bp, Homo sapiens
gaaccataaagggtgccaggtctgg

SEQ ID NO: 1849 - DNA, 25 bp, Homo sapiens
gccaggtctgggtgaaagggatact

SEQ ID NO: 1850 - DNA, 25 bp, Homo sapiens
ggtgcccttattgaacattctagaa

SEQ ID NO: 1851 - DNA, 25 bp, Homo sapiens
tgaaatgccaagtgcctgcttagta

SEQ ID NO: 1852 - DNA, 25 bp, Homo sapiens
tgaacattctagaaggggtggctgg

SEQ ID NO: 1853 - DNA, 25 bp, Homo sapiens
tgcaaccataagacaaactcctgaa

SEQ ID NO: 1854 - DNA, 25 bp, Homo sapiens
aatgaagaccctgcaaagcgaccca

SEQ ID NO: 1855 - DNA, 25 bp, Homo sapiens
aatgtcctggtcgcatgtatgcacc

SEQ ID NO: 1856 - DNA, 25 bp, Homo sapiens
acatgtggagttttgcagtgcttct

SEQ ID NO: 1857 - DNA, 25 bp, Homo sapiens
atccctaccactgtgcgcaagaggg

SEQ ID NO: 1858 - DNA, 25 bp, Homo sapiens
attggaaggccttcggcctaccatc

SEQ ID NO: 1859 - DNA, 25 bp, Homo sapiens
ctttgctgacctctccaatatggag

SEQ ID NO: 1860 - DNA, 25 bp, Homo sapiens
gacacgggaggtaccctttgctgac

SEQ ID NO: 1861 - DNA, 25 bp, Homo sapiens
gacatgattgtgcctatccttgaga

SEQ ID NO: 1862 - DNA, 25 bp, Homo sapiens
gcccccgaagctctgcagaagaagc

SEQ ID NO: 1863 - DNA, 25 bp, Homo sapiens
ggctcagagctttgtcacttgccac

SEQ ID NO: 1864 - DNA, 25 bp, Homo sapiens
gtatttcccctcatgtgtgtaagct

SEQ ID NO: 1865 - DNA, 25 bp, Homo sapiens
accacatacctcaacctggggaact

SEQ ID NO: 1866 - DNA, 25 bp, Homo sapiens
actacgtgatggcagtctccagcta

SEQ ID NO: 1867 - DNA, 25 bp, Homo sapiens
agaggcttaaggtcttcagcggggc

SEQ ID NO: 1868 - DNA, 25 bp, Homo sapiens
aggaggcactcacagagcactacaa

SEQ ID NO: 1869 - DNA, 25 bp, Homo sapiens
cattggggaggacggctccatctgc

SEQ ID NO: 1870 - DNA, 25 bp, Homo sapiens
ccggggctgcgtgagcgagcagagg

SEQ ID NO: 1871 - DNA, 25 bp, Homo sapiens
ctatgaggtgtcctaccgcattggg

SEQ ID NO: 1872 - DNA, 25 bp, Homo sapiens
gcatcaaccacaagatggaccccat

SEQ ID NO: 1873 - DNA, 25 bp, Homo sapiens
ggaccccatcatcagcagggtggcc

SEQ ID NO: 1874 - DNA, 25 bp, Homo sapiens
tccatctgcgtcttgtacgaggagg

SEQ ID NO: 1875 - DNA, 25 bp, Homo sapiens
tcctcacctgcaagaaccaagtgct

SEQ ID NO: 1876 - DNA, 25 bp, Homo sapiens
aacctactagtcttgaacaaactgt

SEQ ID NO: 1877 - DNA, 25 bp, Homo sapiens
aactgtcatacgtatgggacctaca

SEQ ID NO: 1878 - DNA, 25 bp, Homo sapiens
acacttaatctatatgctttacact

SEQ ID NO: 1879 - DNA, 25 bp, Homo sapiens
agagctgatcacaagcacaaatctt

SEQ ID NO: 1880 - DNA, 25 bp, Homo sapiens
atatgctttacactagctttctgca

SEQ ID NO: 1881 - DNA, 25 bp, Homo sapiens
ctttcccactagccatttaataagt

SEQ ID NO: 1882 - DNA, 25 bp, Homo sapiens
gctttacactagctttctgcattta

SEQ ID NO: 1883 - DNA, 25 bp, Homo sapiens
gctttctgcatttaataggttagaa

SEQ ID NO: 1884 - DNA, 25 bp, Homo sapiens
ggacctacacttaatctatatgctt

SEQ ID NO: 1885 - DNA, 25 bp, Homo sapiens
gtatgggacctacacttaatctata

SEQ ID NO: 1886 - DNA, 25 bp, Homo sapiens
tgatcacaagcacaaatctttccca

SEQ ID NO: 1887 - DNA, 25 bp, Homo sapiens
atgggcttcggggtgaagcgggcct

SEQ ID NO: 1888 - DNA, 25 bp, Homo sapiens
caaaaagtagaggcagctgcagcca

SEQ ID NO: 1889 - DNA, 25 bp, Homo sapiens
catgaagcttttttctcgttcactc

SEQ ID NO: 1890 - DNA, 25 bp, Homo sapiens
ctacaacggcatcagcctcttcaac

SEQ ID NO: 1891 - DNA, 25 bp, Homo sapiens
gccaggaggcggtccataagaatgg

SEQ ID NO: 1892 - DNA, 25 bp, Homo sapiens
ggcggtccataagaatggggacagt

SEQ ID NO: 1893 - DNA, 25 bp, Homo sapiens
ggtgaagcgggcctactacaacggc

SEQ ID NO: 1894 - DNA, 25 bp, Homo sapiens
tactacaacggcatcagcctcttca

SEQ ID NO: 1895 - DNA, 25 bp, Homo sapiens
tcagcagccaggaggcggtccataa

SEQ ID NO: 1896 - DNA, 25 bp, Homo sapiens
tgaagcgggcctactacaacggcat

SEQ ID NO: 1897 - DNA, 25 bp, Homo sapiens
tggccatccagtttggcaactacaa

SEQ ID NO: 1898 - DNA, 25 bp, Homo sapiens
acagcggaggtgtggagccgaggcc

SEQ ID NO: 1899 - DNA, 25 bp, Homo sapiens
agtgtatgactgcacatgactcggg

SEQ ID NO: 1900 - DNA, 25 bp, Homo sapiens
caccaccaagccaagggaacctgtg

SEQ ID NO: 1901 - DNA, 25 bp, Homo sapiens
cgttggccactccgagaggtgggcc

SEQ ID NO: 1902 - DNA, 25 bp, Homo sapiens
gaggtcggtaggttcagccaaggtt

SEQ ID NO: 1903 - DNA, 25 bp, Homo sapiens
gtgcccaagccagaggctgggttca

SEQ ID NO: 1904 - DNA, 25 bp, Homo sapiens
gttttggctgaaattctcctggagg

SEQ ID NO: 1905 - DNA, 25 bp, Homo sapiens
tattcgatactgcgactttctgcct

SEQ ID NO: 1906 - DNA, 25 bp, Homo sapiens
tatttgacaacgtttcagcgactcc

SEQ ID NO: 1907 - DNA, 25 bp, Homo sapiens
tcatctgctggtccgtgggacggtg

SEQ ID NO: 1908 - DNA, 25 bp, Homo sapiens
tccaagccccatcttctaaatggca

SEQ ID NO: 1909 - DNA, 25 bp, Homo sapiens
aagaccattcccagtatacataagc

SEQ ID NO: 1910 - DNA, 25 bp, Homo sapiens
acagtccttataaaccattggcatg

SEQ ID NO: 1911 - DNA, 25 bp, Homo sapiens
agaatcctaggcagtggctcattgt

SEQ ID NO: 1912 - DNA, 25 bp, Homo sapiens
agcatcggagccattcattcggaga

SEQ ID NO: 1913 - DNA, 25 bp, Homo sapiens
cgacaggcttgtctgtttactagct

SEQ ID NO: 1914 - DNA, 25 bp, Homo sapiens
ctgcctcaatacccacaaaagacca

SEQ ID NO: 1915 - DNA, 25 bp, Homo sapiens
gcacctgagtcatgtgtattcccgg

SEQ ID NO: 1916 - DNA, 25 bp, Homo sapiens
ggagtttcatggggttcagcctaac

SEQ ID NO: 1917 - DNA, 25 bp, Homo sapiens
gtatttatcacttggacatctgttt

SEQ ID NO: 1918 - DNA, 25 bp, Homo sapiens
tgaggaatcgggtggccgggcaagc

SEQ ID NO: 1919 - DNA, 25 bp, Homo sapiens
tggccttggacgggtggctgacatc

SEQ ID NO: 1920 - DNA, 25 bp, Homo sapiens
caaaggagcgagcatgtcgtggaca

SEQ ID NO: 1921 - DNA, 25 bp, Homo sapiens
cacggaggactgaggtcgccgggac

SEQ ID NO: 1922 - DNA, 25 bp, Homo sapiens
ccttgtggcagcaacggcacagcta

SEQ ID NO: 1923 - DNA, 25 bp, Homo sapiens
cggcacagctaattctactcacagt

SEQ ID NO: 1924 - DNA, 25 bp, Homo sapiens
gccccaggctcgtggactgagtggg

SEQ ID NO: 1925 - DNA, 25 bp, Homo sapiens
ggacacacacagactatttttagat

SEQ ID NO: 1926 - DNA, 25 bp, Homo sapiens
ggttctggctgtttgagattctcaa

SEQ ID NO: 1927 - DNA, 25 bp, Homo sapiens
gtccgtgggacgggatggttctggc

SEQ ID NO: 1928 - DNA, 25 bp, Homo sapiens
tccagcccgacacggaggactgagg

SEQ ID NO: 1929 - DNA, 25 bp, Homo sapiens
ttctcagaatcccttaacagttgta

SEQ ID NO: 1930 - DNA, 25 bp, Homo sapiens
ttgccttttgcaaccaggaacagca

SEQ ID NO: 1931 - DNA, 25 bp, Homo sapiens
accttggcagacacgtcttgttttc

SEQ ID NO: 1932 - DNA, 25 bp, Homo sapiens
agagaactatgttcttccctgactt

SEQ ID NO: 1933 - DNA, 25 bp, Homo sapiens
agccaggtaccaccattgtaaggaa

SEQ ID NO: 1934 - DNA, 25 bp, Homo sapiens
catctgttatcctgaaccttggcag

SEQ ID NO: 1935 - DNA, 25 bp, Homo sapiens
ccgtcctcccgcagtcagaaaggag

SEQ ID NO: 1936 - DNA, 25 bp, Homo sapiens
ctgccgctctcagtggacagggcat

SEQ ID NO: 1937 - DNA, 25 bp, Homo sapiens
gataaatgggtccagggctgatcaa

SEQ ID NO: 1938 - DNA, 25 bp, Homo sapiens
gcagcacggggagggtttggctacc

SEQ ID NO: 1939 - DNA, 25 bp, Homo sapiens
ggaaggtgaatgtgttcccgtcctc

SEQ ID NO: 1940 - DNA, 25 bp, Homo sapiens
tcatgggaccaggcgagagggcacc

SEQ ID NO: 1941 - DNA, 25 bp, Homo sapiens
tggcctcagccttaaacttttgttc

SEQ ID NO: 1942 - DNA, 25 bp, Homo sapiens
acatgtccaagatgggcaacccctt

SEQ ID NO: 1943 - DNA, 25 bp, Homo sapiens
caaggagcgcaagtgcctgctcctc

SEQ ID NO: 1944 - DNA, 25 bp, Homo sapiens
ccaaccgcctcgagtggcggggcga

SEQ ID NO: 1945 - DNA, 25 bp, Homo sapiens
ctcaccatctcggagcggtggcagc

SEQ ID NO: 1946 - DNA, 25 bp, Homo sapiens
ctggtgcagcgggtgcccaagatga

SEQ ID NO: 1947 - DNA, 25 bp, Homo sapiens
gccctgggcaaggactgcatcatgc

SEQ ID NO: 1948 - DNA, 25 bp, Homo sapiens
ggccatgaggaagactacgccctgg

SEQ ID NO: 1949 - DNA, 25 bp, Homo sapiens
gtggcagagactgtcttcgacacca

SEQ ID NO: 1950 - DNA, 25 bp, Homo sapiens
tggtggagctgagcaaggtgccgct

SEQ ID NO: 1951 - DNA, 25 bp, Homo sapiens
ttcgacaccatcaacgctgagacag

SEQ ID NO: 1952 - DNA, 25 bp, Homo sapiens
tttgcagtgcgatagcgaccctgag

SEQ ID NO: 1953 - DNA, 25 bp, Homo sapiens
agctgctctgaggtaaaggtccatg

SEQ ID NO: 1954 - DNA, 25 bp, Homo sapiens
aggttccagtgcctgacttgggata

SEQ ID NO: 1955 - DNA, 25 bp, Homo sapiens
cagggtaagctgctctgaggtaaag

SEQ ID NO: 1956 - DNA, 25 bp, Homo sapiens
ccttttcagcaggttccagtgcctg

SEQ ID NO: 1957 - DNA, 25 bp, Homo sapiens
gaggtaaaggtccatgaaccctgcc

SEQ ID NO: 1958 - DNA, 25 bp, Homo sapiens
gagtggaggggcatagcctttccct

SEQ ID NO: 1959 - DNA, 25 bp, Homo sapiens
ggagggggagtggaggggcatagcc

SEQ ID NO: 1960 - DNA, 25 bp, Homo sapiens
gggataggactgagtggtaggagga

SEQ ID NO: 1961 - DNA, 25 bp, Homo sapiens
gtgcctgacttgggataggactgag

SEQ ID NO: 1962 - DNA, 25 bp, Homo sapiens
gttccagtgcctgacttgggatagg

SEQ ID NO: 1963 - DNA, 25 bp, Homo sapiens
tcagcaggttccagtgcctgacttg

SEQ ID NO: 1964 - DNA, 25 bp, Homo sapiens
agctggcttctgctggccaggatag

SEQ ID NO: 1965 - DNA, 25 bp, Homo sapiens
caaggacactaatgagcctgggagg

SEQ ID NO: 1966 - DNA, 25 bp, Homo sapiens
ccccttccaaggacactaatgagcc

SEQ ID NO: 1967 - DNA, 25 bp, Homo sapiens
gaagagctattcatcactgtaatta

SEQ ID NO: 1968 - DNA, 25 bp, Homo sapiens
gaggggaggggcgaaggtgctgtaa

SEQ ID NO: 1969 - DNA, 25 bp, Homo sapiens
gctggccaggatagcttaaccctga

SEQ ID NO: 1970 - DNA, 25 bp, Homo sapiens
ggaagtgcagagtggatggacgggt

SEQ ID NO: 1971 - DNA, 25 bp, Homo sapiens
gtggatggacgggtttagaggggag

SEQ ID NO: 1972 - DNA, 25 bp, Homo sapiens
tccgggtaggccttgatatcacctc

SEQ ID NO: 1973 - DNA, 25 bp, Homo sapiens
tctgttccgggtaggccttgatatc

SEQ ID NO: 1974 - DNA, 25 bp, Homo sapiens
ttaaccctgactttgggatctgcct

SEQ ID NO: 1975 - DNA, 25 bp, Homo sapiens
cttgttcttcacgactgtctatact

SEQ ID NO: 1976 - DNA, 25 bp, Homo sapiens
gacacctgagcctggattttcactc

SEQ ID NO: 1977 - DNA, 25 bp, Homo sapiens
gagaagccctttccagtagggtggg

SEQ ID NO: 1978 - DNA, 25 bp, Homo sapiens
gagtgtcatgtttccacaaagggct

SEQ ID NO: 1979 - DNA, 25 bp, Homo sapiens
gattttcactcatccctgagaagcc

SEQ ID NO: 1980 - DNA, 25 bp, Homo sapiens
gccagcattcattgtaagttccctc

SEQ ID NO: 1981 - DNA, 25 bp, Homo sapiens
gctgtgaggcagctctggaacgtga

SEQ ID NO: 1982 - DNA, 25 bp, Homo sapiens
gtaatctcctgtgatctgtgctagc

SEQ ID NO: 1983 - DNA, 25 bp, Homo sapiens
tagggtgggcaattcccaacttcct

SEQ ID NO: 1984 - DNA, 25 bp, Homo sapiens
tgagggccacgggcttgggtagtgg

SEQ ID NO: 1985 - DNA, 25 bp, Homo sapiens
tgggtttacttcaaaatccctcagc

SEQ ID NO: 1986 - DNA, 25 bp, Homo sapiens
aaaacaacttggcatttctatactt

SEQ ID NO: 1987 - DNA, 25 bp, Homo sapiens
atacagattttacctatccacaata

SEQ ID NO: 1988 - DNA, 25 bp, Homo sapiens
cctggcccactctgtaatagttcag

SEQ ID NO: 1989 - DNA, 25 bp, Homo sapiens
cctttgtcttgtacttctgtgttca

SEQ ID NO: 1990 - DNA, 25 bp, Homo sapiens
gaattacagtacacatccccagaat

SEQ ID NO: 1991 - DNA, 25 bp, Homo sapiens
gatttccatcttaatgttactcaga

SEQ ID NO: 1992 - DNA, 25 bp, Homo sapiens
taagagaagtctcattcgcctttgt

SEQ ID NO: 1993 - DNA, 25 bp, Homo sapiens
taatttatttgtttccctacttgat

SEQ ID NO: 1994 - DNA, 25 bp, Homo sapiens
tacagttttctagcaattttctttg

SEQ ID NO: 1995 - DNA, 25 bp, Homo sapiens
ttgtctttgctgtactcttgctgat

SEQ ID NO: 1996 - DNA, 25 bp, Homo sapiens
tttggctagagtttccactatccca

SEQ ID NO: 1997 - DNA, 25 bp, Homo sapiens
aggataagccaaactgtaggtagca

SEQ ID NO: 1998 - DNA, 25 bp, Homo sapiens
aggcacagtcattcagtcttaggta

SEQ ID NO: 1999 - DNA, 25 bp, Homo sapiens
gaagtatggctatcagaccaaagga

SEQ ID NO: 2000 - DNA, 25 bp, Homo sapiens
gaatcttgttagtgttgcaatctaa

SEQ ID NO: 2001 - DNA, 25 bp, Homo sapiens
gagttgtttctatgttaagtgtcaa

SEQ ID NO: 2002 - DNA, 25 bp, Homo sapiens
ggtggggacatatgcattaagaatc

SEQ ID NO: 2003 - DNA, 25 bp, Homo sapiens
gtagtatggtattctgtaaacttga

SEQ ID NO: 2004 - DNA, 25 bp, Homo sapiens
taaacttgacaaaaaccctgtatga

SEQ ID NO: 2005 - DNA, 25 bp, Homo sapiens
tacatacttgtatagtcctgtgaga

SEQ ID NO: 2006 - DNA, 25 bp, Homo sapiens
tactctttgtaggtatcatttgaaa

SEQ ID NO: 2007 - DNA, 25 bp, Homo sapiens
ttgaaaacttgatctactctttgta

SEQ ID NO: 2008 - DNA, 25 bp, Homo sapiens
aaatcagtgatctatgtttgtgtga

SEQ ID NO: 2009 - DNA, 25 bp, Homo sapiens
aattacattcctaactagaattagt

SEQ ID NO: 2010 - DNA, 25 bp, Homo sapiens
gaacagcataagtttggagcactag

SEQ ID NO: 2011 - DNA, 25 bp, Homo sapiens
ggtgaaggatccaggaatatgacac

SEQ ID NO: 2012 - DNA, 25 bp, Homo sapiens
gtaactacaaagctttgctacaaat

SEQ ID NO: 2013 - DNA, 25 bp, Homo sapiens
gtagaaaagcagtcccattcatatt

SEQ ID NO: 2014 - DNA, 25 bp, Homo sapiens
gtgtgatttcctaaacataattgtg

SEQ ID NO: 2015 - DNA, 25 bp, Homo sapiens
gtttttgtatctttatgctgtattt

SEQ ID NO: 2016 - DNA, 25 bp, Homo sapiens
tcccattcatattaagacagtgtac

SEQ ID NO: 2017 - DNA, 25 bp, Homo sapiens
tgctttggttaaaaatggctcaagt

SEQ ID NO: 2018 - DNA, 25 bp, Homo sapiens
tttttttcctcatgtaacattggtg

SEQ ID NO: 2019 - DNA, 25 bp, Homo sapiens
aaactatgcttcttttttcttctgt

SEQ ID NO: 2020 - DNA, 25 bp, Homo sapiens
aaatggacggggcagcttcacaagg

SEQ ID NO: 2021 - DNA, 25 bp, Homo sapiens
aaggcaagtcttcatgctcggtgat

SEQ ID NO: 2022 - DNA, 25 bp, Homo sapiens
cagactgctgtggatgtttttcgaa

SEQ ID NO: 2023 - DNA, 25 bp, Homo sapiens
ctgcccgttctccttgaagataaac

SEQ ID NO: 2024 - DNA, 25 bp, Homo sapiens
gctcggtgatgtgattctgctgcaa

SEQ ID NO: 2025 - DNA, 25 bp, Homo sapiens
gtctgtccaaatgagttcacttcca

SEQ ID NO: 2026 - DNA, 25 bp, Homo sapiens
tatcatttgggtcagagctcccctc

SEQ ID NO: 2027 - DNA, 25 bp, Homo sapiens
tcccctcccttcagattatgttaac

SEQ ID NO: 2028 - DNA, 25 bp, Homo sapiens
tctgctgcaaagcctgaggacactg

SEQ ID NO: 2029 - DNA, 25 bp, Homo sapiens
tgaagaagcaaactgcccgttctcc

SEQ ID NO: 2030 - DNA, 25 bp, Homo sapiens
aactctctacaggaatatatttttt

SEQ ID NO: 2031 - DNA, 25 bp, Homo sapiens
aagcaataactctctacaggaatat

SEQ ID NO: 2032 - DNA, 25 bp, Homo sapiens
aatgcgcgttgactacgagcagatc

SEQ ID NO: 2033 - DNA, 25 bp, Homo sapiens
agacagaactgtccacatctgcctc

SEQ ID NO: 2034 - DNA, 25 bp, Homo sapiens
cacaatgcgcgttgactacgagcag

SEQ ID NO: 2035 - DNA, 25 bp, Homo sapiens
cctgcccacgggaggacaagcaata

SEQ ID NO: 2036 - DNA, 25 bp, Homo sapiens
ctcctgcccacgggaggacaagcaa

SEQ ID NO: 2037 - DNA, 25 bp, Homo sapiens
gcgcgttgactacgagcagatcaag

SEQ ID NO: 2038 - DNA, 25 bp, Homo sapiens
gctgaagaggcggaagaaagctcgg

SEQ ID NO: 2039 - DNA, 25 bp, Homo sapiens
ggacaagcaataactctctacagga

SEQ ID NO: 2040 - DNA, 25 bp, Homo sapiens
gttgactacgagcagatcaagataa

SEQ ID NO: 2041 - DNA, 25 bp, Homo sapiens
aaacagcttcatgcctttgtaagtt

SEQ ID NO: 2042 - DNA, 25 bp, Homo sapiens
cctgccttcgttaactgtgtatgta

SEQ ID NO: 2043 - DNA, 25 bp, Homo sapiens
cgcccccagtgtgcacgagtgggaa

SEQ ID NO: 2044 - DNA, 25 bp, Homo sapiens
cttggcgtggagccagggagcggcc

SEQ ID NO: 2045 - DNA, 25 bp, Homo sapiens
gagcactctgagtttaccatttgta

SEQ ID NO: 2046 - DNA, 25 bp, Homo sapiens
gggcggcaggagggaggtttgtgag

SEQ ID NO: 2047 - DNA, 25 bp, Homo sapiens
gtagattgcttctgtagtactcctt

SEQ ID NO: 2048 - DNA, 25 bp, Homo sapiens
tacagatgaactctttctggcctgc

SEQ ID NO: 2049 - DNA, 25 bp, Homo sapiens
tatcctgcccagtgttgtttgtaaa

SEQ ID NO: 2050 - DNA, 25 bp, Homo sapiens
tggacctaacattcgatctcattca

SEQ ID NO: 2051 - DNA, 25 bp, Homo sapiens
ttgtttgtttgtttgggtatcctgc

SEQ ID NO: 2052 - DNA, 25 bp, Homo sapiens
aaaaccttgaaagctcagaactcgg

SEQ ID NO: 2053 - DNA, 25 bp, Homo sapiens
aacagtgggtgccaactcatgctaa

SEQ ID NO: 2054 - DNA, 25 bp, Homo sapiens
aactcatgctaacgcagcagttgca

SEQ ID NO: 2055 - DNA, 25 bp, Homo sapiens
agagaatcgcccggctggaggaaaa

SEQ ID NO: 2056 - DNA, 25 bp, Homo sapiens
agcgcatgaggaaccgcatcgctgc

SEQ ID NO: 2057 - DNA, 25 bp, Homo sapiens
cattttgaagagagaccgtcggggg

SEQ ID NO: 2058 - DNA, 25 bp, Homo sapiens
ctgcctccaagtgccgaaaaaggaa

SEQ ID NO: 2059 - DNA, 25 bp, Homo sapiens
gaaggaggagcctcagacagtgccc

SEQ ID NO: 2060 - DNA, 25 bp, Homo sapiens
gctcagaactcggagctggcgtcca

SEQ ID NO: 2061 - DNA, 25 bp, Homo sapiens
gggaacaggtggcacagcttaaaca

SEQ ID NO: 2062 - DNA, 25 bp, Homo sapiens
tggagtcccaggagcggatcaaggc

SEQ ID NO: 2063 - DNA, 25 bp, Homo sapiens
aaatcactctcagtgcttcttacta

SEQ ID NO: 2064 - DNA, 25 bp, Homo sapiens
agcccactgagaagtcaaacatttc

SEQ ID NO: 2065 - DNA, 25 bp, Homo sapiens
aggtgcttattctcaaagcaggaat

SEQ ID NO: 2066 - DNA, 25 bp, Homo sapiens
atctatatggaattgcttaccaaag

SEQ ID NO: 2067 - DNA, 25 bp, Homo sapiens
atgtacctgatgtacctgatgctat

SEQ ID NO: 2068 - DNA, 25 bp, Homo sapiens
cttctctttgacaattcctagataa

SEQ ID NO: 2069 - DNA, 25 bp, Homo sapiens
gcaggaattggtggcagattttaca

SEQ ID NO: 2070 - DNA, 25 bp, Homo sapiens
gcagtaaaaactgttctctattaga

SEQ ID NO: 2071 - DNA, 25 bp, Homo sapiens
gtggcatgtgctgtgaccatttata

SEQ ID NO: 2072 - DNA, 25 bp, Homo sapiens
tagtgcgatgtttcaggaggctgga

SEQ ID NO: 2073 - DNA, 25 bp, Homo sapiens
tttacaataggtgcttattctcaaa

SEQ ID NO: 2074 - DNA, 25 bp, Homo sapiens
aacctcctttaccagatgctgactg

SEQ ID NO: 2075 - DNA, 25 bp, Homo sapiens
aatagtcaatttctacttctggaag

SEQ ID NO: 2076 - DNA, 25 bp, Homo sapiens
actgccctcttgtggtgcattgaaa

SEQ ID NO: 2077 - DNA, 25 bp, Homo sapiens
agtcatctcattccactgttggtat

SEQ ID NO: 2078 - DNA, 25 bp, Homo sapiens
gaatatgataaaacactgccctctt

SEQ ID NO: 2079 - DNA, 25 bp, Homo sapiens
gacagcctcttacttgccaagaaaa

SEQ ID NO: 2080 - DNA, 25 bp, Homo sapiens
gacggctgggtgtttcagtttgcaa

SEQ ID NO: 2081 - DNA, 25 bp, Homo sapiens
gatgacttaccatgggatggggtcc

SEQ ID NO: 2082 - DNA, 25 bp, Homo sapiens
tatccacaatagctgacggctgggt

SEQ ID NO: 2083 - DNA, 25 bp, Homo sapiens
ttcatcttcactgcaattttgtgta

SEQ ID NO: 2084 - DNA, 25 bp, Homo sapiens
ttggaccgagctggaaaacctcctt

SEQ ID NO: 2085 - DNA, 25 bp, Homo sapiens
agcctgcaagaccagctggacgagg

SEQ ID NO: 2086 - DNA, 25 bp, Homo sapiens
agctgcgccagctggaggaggagcg

SEQ ID NO: 2087 - DNA, 25 bp, Homo sapiens
agctggccaaggacgtggcgtccct

SEQ ID NO: 2088 - DNA, 25 bp, Homo sapiens
caagtgcagcgatggggagcgggcc

SEQ ID NO: 2089 - DNA, 25 bp, Homo sapiens
gaaacccggcagaagctcaacgtgt

SEQ ID NO: 2090 - DNA, 25 bp, Homo sapiens
gaagctgcaggactttgccagcacc

SEQ ID NO: 2091 - DNA, 25 bp, Homo sapiens
gaaggagatcgagaacctcacccag

SEQ ID NO: 2092 - DNA, 25 bp, Homo sapiens
gacacccaggagctgcttcaagaag

SEQ ID NO: 2093 - DNA, 25 bp, Homo sapiens
ggaggccaagcagaacctggagcgc

SEQ ID NO: 2094 - DNA, 25 bp, Homo sapiens
tcaacgtgtctacgaagctgcgcca

SEQ ID NO: 2095 - DNA, 25 bp, Homo sapiens
tccagctctccgactcgaagaagaa

SEQ ID NO: 2096 - DNA, 25 bp, Homo sapiens
aacgccaaccgcaggaagctgcagc

SEQ ID NO: 2097 - DNA, 25 bp, Homo sapiens
aactttctacagttttgcaccacgg

SEQ ID NO: 2098 - DNA, 25 bp, Homo sapiens
atcgcggcgctggaggccaagattg

SEQ ID NO: 2099 - DNA, 25 bp, Homo sapiens
caacgaggccatgggccgcgaggtg

SEQ ID NO: 2100 - DNA, 25 bp, Homo sapiens
gaaacttcgcagtgatgcaccaggc

SEQ ID NO: 2101 - DNA, 25 bp, Homo sapiens
gacactcgagacgcagacttcaatg

SEQ ID NO: 2102 - DNA, 25 bp, Homo sapiens
gagcgcaagatggccgagcagtaca

SEQ ID NO: 2103 - DNA, 25 bp, Homo sapiens
ggaggagcaggtcgagcaggaggcc

SEQ ID NO: 2104 - DNA, 25 bp, Homo sapiens
ggatgaggccacggagagcaacgag

SEQ ID NO: 2105 - DNA, 25 bp, Homo sapiens
ggcaatgccagggtcaagcagctca

SEQ ID NO: 2106 - DNA, 25 bp, Homo sapiens
tcaagtccaagttcaagtccaccat

SEQ ID NO: 2107 - DNA, 25 bp, Homo sapiens
actttttcacgtggattttgcttgg

SEQ ID NO: 2108 - DNA, 25 bp, Homo sapiens
atccaggccaactactcactaatgg

SEQ ID NO: 2109 - DNA, 25 bp, Homo sapiens
atcgaaggtgaagccaccccagtta

SEQ ID NO: 2110 - DNA, 25 bp, Homo sapiens
atgagaactatgccctcgtgtattc

SEQ ID NO: 2111 - DNA, 25 bp, Homo sapiens
caagctctcgtaaccaggttctaca

SEQ ID NO: 2112 - DNA, 25 bp, Homo sapiens
cctggccaccgactatgagaactat

SEQ ID NO: 2113 - DNA, 25 bp, Homo sapiens
cttggcaagaaaccctaatctccct

SEQ ID NO: 2114 - DNA, 25 bp, Homo sapiens
ggtcacagaccaggtgaactgcccc

SEQ ID NO: 2115 - DNA, 25 bp, Homo sapiens
taaacatgtaaccatgccctaccct

SEQ ID NO: 2116 - DNA, 25 bp, Homo sapiens
tatgccatcggcaccgtactggatc

SEQ ID NO: 2117 - DNA, 25 bp, Homo sapiens
tgagaatggacgctgcatccaggcc

SEQ ID NO: 2118 - DNA, 25 bp, Homo sapiens
caaaggcatatcttctatatctgaa

SEQ ID NO: 2119 - DNA, 25 bp, Homo sapiens
ctagaattcgaaggctctctctttc

SEQ ID NO: 2120 - DNA, 25 bp, Homo sapiens
ctttttctacctgtacacattcctg

SEQ ID NO: 2121 - DNA, 25 bp, Homo sapiens
gagcggctacaaagcgtttctttac

SEQ ID NO: 2122 - DNA, 25 bp, Homo sapiens
gaggtgctacatagttggtaatgct

SEQ ID NO: 2123 - DNA, 25 bp, Homo sapiens
gagtatccttccttcagggtttaat

SEQ ID NO: 2124 - DNA, 25 bp, Homo sapiens
ggaccgctgataagcattgacttgc

SEQ ID NO: 2125 - DNA, 25 bp, Homo sapiens
ggctctctctttctagaggtgctac

SEQ ID NO: 2126 - DNA, 25 bp, Homo sapiens
ggtgagtgcgtactttttctacctg

SEQ ID NO: 2127 - DNA, 25 bp, Homo sapiens
gtcccctaaggaaatccgagcggct

SEQ ID NO: 2128 - DNA, 25 bp, Homo sapiens
tctcttctgaggaccgctgataagc

SEQ ID NO: 2129 - DNA, 25 bp, Homo sapiens
aaccccgattttagatgtgatattt

SEQ ID NO: 2130 - DNA, 25 bp, Homo sapiens
atggatgttagcagtttattgacct

SEQ ID NO: 2131 - DNA, 25 bp, Homo sapiens
atggggcctggaactccagcaggat

SEQ ID NO: 2132 - DNA, 25 bp, Homo sapiens
atgtccctcaagtttatggcagtgt

SEQ ID NO: 2133 - DNA, 25 bp, Homo sapiens
gacatgcgtactgagcgctttgggc

SEQ ID NO: 2134 - DNA, 25 bp, Homo sapiens
gagaagagtacgaaggcccaaacaa

SEQ ID NO: 2135 - DNA, 25 bp, Homo sapiens
gcgctttgggcagggaggtgcgggg

SEQ ID NO: 2136 - DNA, 25 bp, Homo sapiens
gggcctgtgggtggacagggtccta

SEQ ID NO: 2137 - DNA, 25 bp, Homo sapiens
gggtcctagaggaatggggcctgga

SEQ ID NO: 2138 - DNA, 25 bp, Homo sapiens
gtgtaccttgtgccactgaatttcc

SEQ ID NO: 2139 - DNA, 25 bp, Homo sapiens
ttaggctttcattccagtttgtttt

SEQ ID NO: 2140 - DNA, 25 bp, Homo sapiens
catgtatcacatgtcttcagaagca

SEQ ID NO: 2141 - DNA, 25 bp, Homo sapiens
ccaagacctagttacccagacagtg

SEQ ID NO: 2142 - DNA, 25 bp, Homo sapiens
cccaaggtctagctaggcccaagac

SEQ ID NO: 2143 - DNA, 25 bp, Homo sapiens
ggctgtagcacaggcttcacagtga

SEQ ID NO: 2144 - DNA, 25 bp, Homo sapiens
gtcctcttgcgtgtccaaaagtagc

SEQ ID NO: 2145 - DNA, 25 bp, Homo sapiens
gtgacgtccaggttgtccttgagta

SEQ ID NO: 2146 - DNA, 25 bp, Homo sapiens
gtgattttgtgttcagccgtgagtc

SEQ ID NO: 2147 - DNA, 25 bp, Homo sapiens
gtggcagaggggccactacccaagg

SEQ ID NO: 2148 - DNA, 25 bp, Homo sapiens
tcagccgtgagtcacactacatgcc

SEQ ID NO: 2149 - DNA, 25 bp, Homo sapiens
tcatgtaaccgagtgtcctcttgcg

SEQ ID NO: 2150 - DNA, 25 bp, Homo sapiens
tccgagccaggtcaggcttcggagg

SEQ ID NO: 2151 - DNA, 25 bp, Homo sapiens
aagctggaggctgagatcgccacct

SEQ ID NO: 2152 - DNA, 25 bp, Homo sapiens
agcagctcaacgggatcctgctgca

SEQ ID NO: 2153 - DNA, 25 bp, Homo sapiens
ccaccacccgccggatagtggatgg

SEQ ID NO: 2154 - DNA, 25 bp, Homo sapiens
cgctacgccctacagatggagcagc

SEQ ID NO: 2155 - DNA, 25 bp, Homo sapiens
gagagcaccacagtggtcaccacac

SEQ ID NO: 2156 - DNA, 25 bp, Homo sapiens
gagctgctgagacgacgctcacaga

SEQ ID NO: 2157 - DNA, 25 bp, Homo sapiens
gaggccctgctgaacatcaaggtca

SEQ ID NO: 2158 - DNA, 25 bp, Homo sapiens
gtcaccacacagtctgctgaggttg

SEQ ID NO: 2159 - DNA, 25 bp, Homo sapiens
tcctgctgcaccttgagtcagagct

SEQ ID NO: 2160 - DNA, 25 bp, Homo sapiens
tgagacgtacagtccagtccttgga

SEQ ID NO: 2161 - DNA, 25 bp, Homo sapiens
tgatgccttggacagcagcaactcc

SEQ ID NO: 2162 - DNA, 25 bp, Homo sapiens
aaaagttatctctgggtattgcata

SEQ ID NO: 2163 - DNA, 25 bp, Homo sapiens
aatgcatctatatacagacagcctc

SEQ ID NO: 2164 - DNA, 25 bp, Homo sapiens
agaacaacgtttatgaacctgccgt

SEQ ID NO: 2165 - DNA, 25 bp, Homo sapiens
agctttattcctaatgtgggcacat

SEQ ID NO: 2166 - DNA, 25 bp, Homo sapiens
agtaaacttcatattggccaacacc

SEQ ID NO: 2167 - DNA, 25 bp, Homo sapiens
cagacagcctctaaatcaagtcctt

SEQ ID NO: 2168 - DNA, 25 bp, Homo sapiens
caggtggtcctgtaaaagctttatt

SEQ ID NO: 2169 - DNA, 25 bp, Homo sapiens
gaacctgccgtttgctttgtaacgt

SEQ ID NO: 2170 - DNA, 25 bp, Homo sapiens
gatgtgcatgtgtacttcctaaggt

SEQ ID NO: 2171 - DNA, 25 bp, Homo sapiens
ggccaacaccagggttgtattctat

SEQ ID NO: 2172 - DNA, 25 bp, Homo sapiens
gtaatggcatctatattcagttgaa

SEQ ID NO: 2173 - DNA, 25 bp, Homo sapiens
agaaacggaggcgcgctttggagcc

SEQ ID NO: 2174 - DNA, 25 bp, Homo sapiens
aggtccgaggttactgacctgcggc

SEQ ID NO: 2175 - DNA, 25 bp, Homo sapiens
cgcatatccaggcgctgatcagcgg

SEQ ID NO: 2176 - DNA, 25 bp, Homo sapiens
gaatcaggagtaccagcggctcatg

SEQ ID NO: 2177 - DNA, 25 bp, Homo sapiens
gaattgaaccgggaggtcgctggcc

SEQ ID NO: 2178 - DNA, 25 bp, Homo sapiens
gaggtcatggccgagcagaaccgga

SEQ ID NO: 2179 - DNA, 25 bp, Homo sapiens
gatcctgagtgacatgcgaagccaa

SEQ ID NO: 2180 - DNA, 25 bp, Homo sapiens
gctgagcatgaaagctgccttggaa

SEQ ID NO: 2181 - DNA, 25 bp, Homo sapiens
ggcggatgtgcgagctgatagtgag

SEQ ID NO: 2182 - DNA, 25 bp, Homo sapiens
ggctcatggacatcaagtcgcggct

SEQ ID NO: 2183 - DNA, 25 bp, Homo sapiens
tggttcaccagccggactgaagaat

SEQ ID NO: 2184 - DNA, 25 bp, Homo sapiens
aagtcccacaaataactcgctcatg

SEQ ID NO: 2185 - DNA, 25 bp, Homo sapiens
agaacaaaaacgtggcactcctctc

SEQ ID NO: 2186 - DNA, 25 bp, Homo sapiens
aggcgcagagattcaggttctcccc

SEQ ID NO: 2187 - DNA, 25 bp, Homo sapiens
cagatgtttgggccgtttggtgccg

SEQ ID NO: 2188 - DNA, 25 bp, Homo sapiens
gcattttcatctacaacctggggca

SEQ ID NO: 2189 - DNA, 25 bp, Homo sapiens
gctctctggcgtcaacgtgccagga

SEQ ID NO: 2190 - DNA, 25 bp, Homo sapiens
gtcgatcacatgagcgggctctctg

SEQ ID NO: 2191 - DNA, 25 bp, Homo sapiens
gtgaaagtgatccgcgacttcaaca

SEQ ID NO: 2192 - DNA, 25 bp, Homo sapiens
gtgtacaactcattttgcgccaatt

SEQ ID NO: 2193 - DNA, 25 bp, Homo sapiens
tgaagaagccgcgatggccatagcc

SEQ ID NO: 2194 - DNA, 25 bp, Homo sapiens
tgccgacgaggggatcctctggcag

SEQ ID NO: 2195 - DNA, 25 bp, Homo sapiens
atgctgagccgcatcgagaagcagc

SEQ ID NO: 2196 - DNA, 25 bp, Homo sapiens
catcgagaagcagctcaagcgccgc

SEQ ID NO: 2197 - DNA, 25 bp, Homo sapiens
catcgcggaagccctcagcaagatg

SEQ ID NO: 2198 - DNA, 25 bp, Homo sapiens
cgcccgctctagcgggttctgggaa

SEQ ID NO: 2199 - DNA, 25 bp, Homo sapiens
gaggaccaggagatgctgagccgca

SEQ ID NO: 2200 - DNA, 25 bp, Homo sapiens
gcacagcatcatcaaggacttcacc

SEQ ID NO: 2201 - DNA, 25 bp, Homo sapiens
gctcttccaagtgtccacgttggat

SEQ ID NO: 2202 - DNA, 25 bp, Homo sapiens
ggacttcaccaagcagaaatacccg

SEQ ID NO: 2203 - DNA, 25 bp, Homo sapiens
tcccaggtgtctgagcacagcatca

SEQ ID NO: 2204 - DNA, 25 bp, Homo sapiens
tgtcaggggtggagggcttcaccag

SEQ ID NO: 2205 - DNA, 25 bp, Homo sapiens
ttgtccggtaccctgtcaggggtgg

SEQ ID NO: 2206 - DNA, 25 bp, Homo sapiens
acttgctcctgaccgtcaagatgga

SEQ ID NO: 2207 - DNA, 25 bp, Homo sapiens
agaatcgggagtgctccaagctgcc

SEQ ID NO: 2208 - DNA, 25 bp, Homo sapiens
caatgaggagggctttttcaccacc

SEQ ID NO: 2209 - DNA, 25 bp, Homo sapiens
cgcttgccttgccatgagaatcggg

SEQ ID NO: 2210 - DNA, 25 bp, Homo sapiens
ctccagtgctgtccccggggacagc

SEQ ID NO: 2211 - DNA, 25 bp, Homo sapiens
ctctgagaataacctactaccacct

SEQ ID NO: 2212 - DNA, 25 bp, Homo sapiens
ctgtccccggggacagcatgcagct

SEQ ID NO: 2213 - DNA, 25 bp, Homo sapiens
gaccgtcaagatggatctctctcgc

SEQ ID NO: 2214 - DNA, 25 bp, Homo sapiens
gctgcctctgagaataacctactac

SEQ ID NO: 2215 - DNA, 25 bp, Homo sapiens
tcctttgtggccaagcttttcatct

SEQ ID NO: 2216 - DNA, 25 bp, Homo sapiens
tggccatcaccggcggcaatgagga

SEQ ID NO: 2217 - DNA, 25 bp, Homo sapiens
ccaccgctggctgggaggagtcgga

SEQ ID NO: 2218 - DNA, 25 bp, Homo sapiens
cccagctggaacccgagtttgagga

SEQ ID NO: 2219 - DNA, 25 bp, Homo sapiens
gaccaaggtggagcccgagtttgag

SEQ ID NO: 2220 - DNA, 25 bp, Homo sapiens
gagacccagttggagcctgagttcg

SEQ ID NO: 2221 - DNA, 25 bp, Homo sapiens
gagggagggagccaaggtcactcca

SEQ ID NO: 2222 - DNA, 25 bp, Homo sapiens
gaggtggagcccgagtttgggacca

SEQ ID NO: 2223 - DNA, 25 bp, Homo sapiens
gccagaggctgtgtagaggctcctg

SEQ ID NO: 2224 - DNA, 25 bp, Homo sapiens
ggagatagccactggccaggcattc

SEQ ID NO: 2225 - DNA, 25 bp, Homo sapiens
gtcctgcccctttgagggggtgcaa

SEQ ID NO: 2226 - DNA, 25 bp, Homo sapiens
tcagcacatggaaggcccctggtat

SEQ ID NO: 2227 - DNA, 25 bp, Homo sapiens
ttctgagatcagcgtcctaccaaga

SEQ ID NO: 2228 - DNA, 25 bp, Homo sapiens
agcagctccagcgtcaaatttgtct

SEQ ID NO: 2229 - DNA, 25 bp, Homo sapiens
agtggaagctactactccagcagca

SEQ ID NO: 2230 - DNA, 25 bp, Homo sapiens
cccatggagattgcctcttctaggc

SEQ ID NO: 2231 - DNA, 25 bp, Homo sapiens
cggtggaggtcttgccggaggtagc

SEQ ID NO: 2232 - DNA, 25 bp, Homo sapiens
ggctctggcttcagtgcaagcagtg

SEQ ID NO: 2233 - DNA, 25 bp, Homo sapiens
gtcactgccttccaagtgcagcaac

SEQ ID NO: 2234 - DNA, 25 bp, Homo sapiens
gtgccgcagttctatattctgcttc

SEQ ID NO: 2235 - DNA, 25 bp, Homo sapiens
taagaacctgctgcaagtcactgcc

SEQ ID NO: 2236 - DNA, 25 bp, Homo sapiens
tcaaatcagccttcaggtttcccac

SEQ ID NO: 2237 - DNA, 25 bp, Homo sapiens
tcggcctaggtggtgggctcagtgt

SEQ ID NO: 2238 - DNA, 25 bp, Homo sapiens
ttgttttggttctaactacctccag

SEQ ID NO: 2239 - DNA, 25 bp, Homo sapiens
actggctttaccaatcttgaaattt

SEQ ID NO: 2240 - DNA, 25 bp, Homo sapiens
acttggactccatcgttaaaattat

SEQ ID NO: 2241 - DNA, 25 bp, Homo sapiens
agcagcttgaaactggctttaccaa

SEQ ID NO: 2242 - DNA, 25 bp, Homo sapiens
agggtctaaaagctggtgttattgc

SEQ ID NO: 2243 - DNA, 25 bp, Homo sapiens
gaaaaagcacctgaattctcaatgc

SEQ ID NO: 2244 - DNA, 25 bp, Homo sapiens
gctgcctttctatttacttgagtct

SEQ ID NO: 2245 - DNA, 25 bp, Homo sapiens
gctggaattgttgtgctggttattt

SEQ ID NO: 2246 - DNA, 25 bp, Homo sapiens
gtgcgtgggacgaagacatctttga

SEQ ID NO: 2247 - DNA, 25 bp, Homo sapiens
gtgtgcattaaatatgcttccacag

SEQ ID NO: 2248 - DNA, 25 bp, Homo sapiens
gtgttattgctgttattgtggttgt

SEQ ID NO: 2249 - DNA, 25 bp, Homo sapiens
tgaccacaagtgtcttatatatgca

SEQ ID NO: 2250 - DNA, 25 bp, Homo sapiens
acgaggagcggcaggacgagcatgg

SEQ ID NO: 2251 - DNA, 25 bp, Homo sapiens
agatcaccggcaagcacgaggagcg

SEQ ID NO: 2252 - DNA, 25 bp, Homo sapiens
caccggcaagcacgaggagcggcag

SEQ ID NO: 2253 - DNA, 25 bp, Homo sapiens
gacggtcaagaccaaggatggcgtg

SEQ ID NO: 2254 - DNA, 25 bp, Homo sapiens
gcaggacgagcatggctacatctcc

SEQ ID NO: 2255 - DNA, 25 bp, Homo sapiens
ggagcggcaggacgagcatggctac

SEQ ID NO: 2256 - DNA, 25 bp, Homo sapiens
ggatggcgtggtggagatcaccggc

SEQ ID NO: 2257 - DNA, 25 bp, Homo sapiens
ggcgtggtggagatcaccggcaagc

SEQ ID NO: 2258 - DNA, 25 bp, Homo sapiens
ggtgcttcacgcggaaatacacgct

SEQ ID NO: 2259 - DNA, 25 bp, Homo sapiens
tcccggtgcttcacgcggaaataca

SEQ ID NO: 2260 - DNA, 25 bp, Homo sapiens
ttcacgcggaaatacacgctgcccc

SEQ ID NO: 2261 - DNA, 25 bp, Homo sapiens
acaaactcagctgtacagttcgtac

SEQ ID NO: 2262 - DNA, 25 bp, Homo sapiens
actaaactcttcttgcttttgcatt

SEQ ID NO: 2263 - DNA, 25 bp, Homo sapiens
agttttctgctgaaggcacctactc

SEQ ID NO: 2264 - DNA, 25 bp, Homo sapiens
cctctcctttgtgttcaacttttgt

SEQ ID NO: 2265 - DNA, 25 bp, Homo sapiens
ctgcattggtgaatttaatcctctc

SEQ ID NO: 2266 - DNA, 25 bp, Homo sapiens
gatcaccctggatgatcagttttct

SEQ ID NO: 2267 - DNA, 25 bp, Homo sapiens
gctgaaggcacctactcagtatctt

SEQ ID NO: 2268 - DNA, 25 bp, Homo sapiens
gtctccgattattaggtgatcaccc

SEQ ID NO: 2269 - DNA, 25 bp, Homo sapiens
gttcgtacactaaactcttcttgct

SEQ ID NO: 2270 - DNA, 25 bp, Homo sapiens
taagcaaatctgtgtctactttaaa

SEQ ID NO: 2271 - DNA, 25 bp, Homo sapiens
ttatctgcaaccttaattcagctga

SEQ ID NO: 2272 - DNA, 25 bp, Homo sapiens
aaagcacccttgacgtcaagtctcc

SEQ ID NO: 2273 - DNA, 25 bp, Homo sapiens
atatttatagtcacaagagcccagc

SEQ ID NO: 2274 - DNA, 25 bp, Homo sapiens
ccaccctgttttcagctaaagccca

SEQ ID NO: 2275 - DNA, 25 bp, Homo sapiens
gaacaactaggcttcagcatattta

SEQ ID NO: 2276 - DNA, 25 bp, Homo sapiens
gaaggtattccttttgtgtacagtg

SEQ ID NO: 2277 - DNA, 25 bp, Homo sapiens
ggaagacatgaatgcacactagcct

SEQ ID NO: 2278 - DNA, 25 bp, Homo sapiens
tcatgttcctcaaaagcacccttga

SEQ ID NO: 2279 - DNA, 25 bp, Homo sapiens
tcccagatacttcccattttggaag

SEQ ID NO: 2280 - DNA, 25 bp, Homo sapiens
tgttgccacaaccctgttttatact

SEQ ID NO: 2281 - DNA, 25 bp, Homo sapiens
ttatagcaatccatgttagttttta

SEQ ID NO: 2282 - DNA, 25 bp, Homo sapiens
ttcaggacttggtctgatttcagga

SEQ ID NO: 2283 - DNA, 25 bp, Homo sapiens
acagtgagtctgtcagcgcaggttt

SEQ ID NO: 2284 - DNA, 25 bp, Homo sapiens
acatccttaaaggcaccatctaata

SEQ ID NO: 2285 - DNA, 25 bp, Homo sapiens
agtgaaggttgctgaggctctgacc

SEQ ID NO: 2286 - DNA, 25 bp, Homo sapiens
atctccccttgcactaaagtatgta

SEQ ID NO: 2287 - DNA, 25 bp, Homo sapiens
attcctttctatcctacaacaagag

SEQ ID NO: 2288 - DNA, 25 bp, Homo sapiens
cacccttctcattccaacagtgagt

SEQ ID NO: 2289 - DNA, 25 bp, Homo sapiens
cctcccccagcagttgaatgacaac

SEQ ID NO: 2290 - DNA, 25 bp, Homo sapiens
gatggagactggtcctgtgtgcagt

SEQ ID NO: 2291 - DNA, 25 bp, Homo sapiens
gcaggtttagtttactcaatctccc

SEQ ID NO: 2292 - DNA, 25 bp, Homo sapiens
tacaggcagcgatggtctcagaaac

SEQ ID NO: 2293 - DNA, 25 bp, Homo sapiens
tagcgggttactttcacatacagcc

SEQ ID NO: 2294 - DNA, 25 bp, Homo sapiens
aatgaactaactgacagcttcatga

SEQ ID NO: 2295 - DNA, 25 bp, Homo sapiens
acaagtttctgataccactgcactg

SEQ ID NO: 2296 - DNA, 25 bp, Homo sapiens
agaagactctgacctgtactcttga

SEQ ID NO: 2297 - DNA, 25 bp, Homo sapiens
atccactcttacagcaatttgataa

SEQ ID NO: 2298 - DNA, 25 bp, Homo sapiens
atgtcttgtttcccagatttcagga

SEQ ID NO: 2299 - DNA, 25 bp, Homo sapiens
atgtggtcgctccagacttgggaaa

SEQ ID NO: 2300 - DNA, 25 bp, Homo sapiens
ctctgacctgtactcttgaatacaa

SEQ ID NO: 2301 - DNA, 25 bp, Homo sapiens
ggtcgctccagacttgggaaactat

SEQ ID NO: 2302 - DNA, 25 bp, Homo sapiens
tctgataccactgcactgtctgaga

SEQ ID NO: 2303 - DNA, 25 bp, Homo sapiens
tgaactaatgaggattgctgattct

SEQ ID NO: 2304 - DNA, 25 bp, Homo sapiens
tgtccaccaagatcaagcagagaaa

SEQ ID NO: 2305 - DNA, 25 bp, Homo sapiens
agaaatgccctggtatctcatctag

SEQ ID NO: 2306 - DNA, 25 bp, Homo sapiens
agcagtggctggatatggccccatt

SEQ ID NO: 2307 - DNA, 25 bp, Homo sapiens
atgcagagacgggcttgctgggtgc

SEQ ID NO: 2308 - DNA, 25 bp, Homo sapiens
caaccggatccgtagcggcatgttc

SEQ ID NO: 2309 - DNA, 25 bp, Homo sapiens
caagctatgccagagtttccagacc

SEQ ID NO: 2310 - DNA, 25 bp, Homo sapiens
gacatgatgttcgtcctgcaagggc

SEQ ID NO: 2311 - DNA, 25 bp, Homo sapiens
ggtgcacactttgtctgtgaccgaa

SEQ ID NO: 2312 - DNA, 25 bp, Homo sapiens
ggtgctgtggccaacaagctatgcc

SEQ ID NO: 2313 - DNA, 25 bp, Homo sapiens
gtgtggtacgtgagatctgctccaa

SEQ ID NO: 2314 - DNA, 25 bp, Homo sapiens
tagatggcactactcctgtgtgtga

SEQ ID NO: 2315 - DNA, 25 bp, Homo sapiens
tgtgaggacatcggacgcagcctcc

SEQ ID NO: 2316 - DNA, 25 bp, Homo sapiens
aagaaccaccctgaggtttccatgc

SEQ ID NO: 2317 - DNA, 25 bp, Homo sapiens
actggctggcacaccagggcaatga

SEQ ID NO: 2318 - DNA, 25 bp, Homo sapiens
agctacagcctgtgctcagttgagt

SEQ ID NO: 2319 - DNA, 25 bp, Homo sapiens
atgcctctcccattttagtggtagc

SEQ ID NO: 2320 - DNA, 25 bp, Homo sapiens
gaaagaatgtttcacccttgcatcc

SEQ ID NO: 2321 - DNA, 25 bp, Homo sapiens
gggcaatgatttccctgcagaagga

SEQ ID NO: 2322 - DNA, 25 bp, Homo sapiens
ggtagcattttgtgtctttactcca

SEQ ID NO: 2323 - DNA, 25 bp, Homo sapiens
gttcacactcagactttggctttat

SEQ ID NO: 2324 - DNA, 25 bp, Homo sapiens
gttgtgcctaccactggctggcaca

SEQ ID NO: 2325 - DNA, 25 bp, Homo sapiens
tagttccaccaaggttcacacacca

SEQ ID NO: 2326 - DNA, 25 bp, Homo sapiens
tttgagtggcctttcaaccctaaga

SEQ ID NO: 2327 - DNA, 25 bp, Homo sapiens
acccctatcccaagttttatgacag

SEQ ID NO: 2328 - DNA, 25 bp, Homo sapiens
accctaatcagtatccttcagcttt

SEQ ID NO: 2329 - DNA, 25 bp, Homo sapiens
ctcagctactttgtccacattggat

SEQ ID NO: 2330 - DNA, 25 bp, Homo sapiens
ctccaggatcctgattggggtgcca

SEQ ID NO: 2331 - DNA, 25 bp, Homo sapiens
gagtcttgtggtagccactccagga

SEQ ID NO: 2332 - DNA, 25 bp, Homo sapiens
tatacactctacattttctctgcac

SEQ ID NO: 2333 - DNA, 25 bp, Homo sapiens
tcttcttcacctctcaggaactgac

SEQ ID NO: 2334 - DNA, 25 bp, Homo sapiens
tgcattgaggcgctctattcttctt

SEQ ID NO: 2335 - DNA, 25 bp, Homo sapiens
tgctctggggagtacaccaggctca

SEQ ID NO: 2336 - DNA, 25 bp, Homo sapiens
tggaaggacacttctttctatcacc

SEQ ID NO: 2337 - DNA, 25 bp, Homo sapiens
ttttacattaacccagtgtcctctg

SEQ ID NO: 2338 - DNA, 25 bp, Homo sapiens
aaggagcagcgggaacggagcttcg

SEQ ID NO: 2339 - DNA, 25 bp, Homo sapiens
agcagcgggaacggagcttcggagc

SEQ ID NO: 2340 - DNA, 25 bp, Homo sapiens
caatctccagggctccaaatctgcc

SEQ ID NO: 2341 - DNA, 25 bp, Homo sapiens
cagggctccaaatctgcctagaaaa

SEQ ID NO: 2342 - DNA, 25 bp, Homo sapiens
cccctgtctgtaaggagcagcggga

SEQ ID NO: 2343 - DNA, 25 bp, Homo sapiens
ccgaggcgcgtttgtgtatatctgc

SEQ ID NO: 2344 - DNA, 25 bp, Homo sapiens
ggcgcgtttgtgtatatctgcctcc

SEQ ID NO: 2345 - DNA, 25 bp, Homo sapiens
ggctccaaatctgcctagaaaacct

SEQ ID NO: 2346 - DNA, 25 bp, Homo sapiens
gggaggtagaaggggaggacactgg

SEQ ID NO: 2347 - DNA, 25 bp, Homo sapiens
gggggcaaaggtttgaagacacagc

SEQ ID NO: 2348 - DNA, 25 bp, Homo sapiens
tccagggctccaaatctgcctagaa

SEQ ID NO: 2349 - DNA, 25 bp, Homo sapiens
aatggtctgtggtgacttttggata

SEQ ID NO: 2350 - DNA, 25 bp, Homo sapiens
atcccattattcaaagttgcctaaa

SEQ ID NO: 2351 - DNA, 25 bp, Homo sapiens
atctagttcactctccatttaataa

SEQ ID NO: 2352 - DNA, 25 bp, Homo sapiens
attttgtttctgtactttttggcat

SEQ ID NO: 2353 - DNA, 25 bp, Homo sapiens
gaatggtccgtgctaaggacttgtt

SEQ ID NO: 2354 - DNA, 25 bp, Homo sapiens
ggacttgttagatctagttcactct

SEQ ID NO: 2355 - DNA, 25 bp, Homo sapiens
gtattgtgcgctaaacttttctgat

SEQ ID NO: 2356 - DNA, 25 bp, Homo sapiens
gtgagttgggtgtattgtgcgctaa

SEQ ID NO: 2357 - DNA, 25 bp, Homo sapiens
tctatattttcattctcctatcacc

SEQ ID NO: 2358 - DNA, 25 bp, Homo sapiens
ttggcttttctgatccagttttgtt

SEQ ID NO: 2359 - DNA, 25 bp, Homo sapiens
tttgtttagtcttgtctcagatttt

SEQ ID NO: 2360 - DNA, 25 bp, Homo sapiens
acagaactcgatgcactgacctgct

SEQ ID NO: 2361 - DNA, 25 bp, Homo sapiens
atccttaaccaccgcatatgcatgc

SEQ ID NO: 2362 - DNA, 25 bp, Homo sapiens
cattattgctgtccaccgaggagtc

SEQ ID NO: 2363 - DNA, 25 bp, Homo sapiens
ctgacctgctccgccaggaaagtga

SEQ ID NO: 2364 - DNA, 25 bp, Homo sapiens
gacgactacggtctggacaactttg

SEQ ID NO: 2365 - DNA, 25 bp, Homo sapiens
gattgaccctttaactgtatcctta

SEQ ID NO: 2366 - DNA, 25 bp, Homo sapiens
gcggtttccaaggtgcacattttcc

SEQ ID NO: 2367 - DNA, 25 bp, Homo sapiens
gctgggagcagaacagtccctcaca

SEQ ID NO: 2368 - DNA, 25 bp, Homo sapiens
tatgcatgccaggctgggcacggct

SEQ ID NO: 2369 - DNA, 25 bp, Homo sapiens
tgctggaggaacttgctgctgtgcc

SEQ ID NO: 2370 - DNA, 25 bp, Homo sapiens
tgtcgtggacacgcgtgattgaccc

SEQ ID NO: 2371 - DNA, 25 bp, Homo sapiens
aagcttcgagctgttgcgtgtgtga

SEQ ID NO: 2372 - DNA, 25 bp, Homo sapiens
caagaggctgcaatattccgtcctg

SEQ ID NO: 2373 - DNA, 25 bp, Homo sapiens
cagtcccgagacggctgagtgaccc

SEQ ID NO: 2374 - DNA, 25 bp, Homo sapiens
ctcccacgtccaggcttaaggtgga

SEQ ID NO: 2375 - DNA, 25 bp, Homo sapiens
ctttaacccacgtttgtctgtcacg

SEQ ID NO: 2376 - DNA, 25 bp, Homo sapiens
gaaaagtgcatggtgggggcctcgg

SEQ ID NO: 2377 - DNA, 25 bp, Homo sapiens
ggcttaaggtggatgcacttcccgc

SEQ ID NO: 2378 - DNA, 25 bp, Homo sapiens
gtgtgtgagtctgttgtgtggatgt

SEQ ID NO: 2379 - DNA, 25 bp, Homo sapiens
tgagtgaccccaagaaaggcttccc

SEQ ID NO: 2380 - DNA, 25 bp, Homo sapiens
tgcggggacattctactgtgctaaa

SEQ ID NO: 2381 - DNA, 25 bp, Homo sapiens
ttctgtgtagcagctttaacccacg

SEQ ID NO: 2382 - DNA, 25 bp, Homo sapiens
agccccagagcagggtgttgggata

SEQ ID NO: 2383 - DNA, 25 bp, Homo sapiens
agctgtgagccttggctgttggcag

SEQ ID NO: 2384 - DNA, 25 bp, Homo sapiens
agggtgttgggatactgcagggcca

SEQ ID NO: 2385 - DNA, 25 bp, Homo sapiens
ccttggctgttggcagtgagtgagc

SEQ ID NO: 2386 - DNA, 25 bp, Homo sapiens
gagccttggctgttggcagtgagtg

SEQ ID NO: 2387 - DNA, 25 bp, Homo sapiens
gcctggctcttgtgctggatggagc

SEQ ID NO: 2388 - DNA, 25 bp, Homo sapiens
ggatactgcagggccaggactgagc

SEQ ID NO: 2389 - DNA, 25 bp, Homo sapiens
gtgagccttggctgttggcagtgag

SEQ ID NO: 2390 - DNA, 25 bp, Homo sapiens
gtgttgggatactgcagggccagga

SEQ ID NO: 2391 - DNA, 25 bp, Homo sapiens
gttgggatactgcagggccaggact

SEQ ID NO: 2392 - DNA, 25 bp, Homo sapiens
tactgcagggccaggactgagcccc

SEQ ID NO: 2393 - DNA, 25 bp, Homo sapiens
aagggataggtatcttgcctccttt

SEQ ID NO: 2394 - DNA, 25 bp, Homo sapiens
aatggcgacagactgttccgttcca

SEQ ID NO: 2395 - DNA, 25 bp, Homo sapiens
acatgtccgtctgctggatcaacag

SEQ ID NO: 2396 - DNA, 25 bp, Homo sapiens
aggcagtgcaaatcaccctgtggaa

SEQ ID NO: 2397 - DNA, 25 bp, Homo sapiens
gaatcccgatgaggacttcagctga

SEQ ID NO: 2398 - DNA, 25 bp, Homo sapiens
gctccattcctagtcttaattacca

SEQ ID NO: 2399 - DNA, 25 bp, Homo sapiens
gggtacgaactggagggcttgtgtg

SEQ ID NO: 2400 - DNA, 25 bp, Homo sapiens
gtggtcgtgcctgtgtgtatcagaa

SEQ ID NO: 2401 - DNA, 25 bp, Homo sapiens
gttccacccccgtgaagagtaatca

SEQ ID NO: 2402 - DNA, 25 bp, Homo sapiens
tacacactgcttaccctgatttatt

SEQ ID NO: 2403 - DNA, 25 bp, Homo sapiens
tttagactgaactgctccattccta

SEQ ID NO: 2404 - DNA, 25 bp, Homo sapiens
aagctagtctgtcttgaaacttgtt

SEQ ID NO: 2405 - DNA, 25 bp, Homo sapiens
atcatctctgtaccattctgtacta

SEQ ID NO: 2406 - DNA, 25 bp, Homo sapiens
atctccccttgcactgagattagtc

SEQ ID NO: 2407 - DNA, 25 bp, Homo sapiens
cccaacttatacgacctgatttcct

SEQ ID NO: 2408 - DNA, 25 bp, Homo sapiens
ctcctgcaggccatgtgtgtattac

SEQ ID NO: 2409 - DNA, 25 bp, Homo sapiens
gagattagtcgtcagatctctcccc

SEQ ID NO: 2410 - DNA, 25 bp, Homo sapiens
ggaccaaacagtgctcatgcttcag

SEQ ID NO: 2411 - DNA, 25 bp, Homo sapiens
gtgttctcttctcaaggctttgaaa

SEQ ID NO: 2412 - DNA, 25 bp, Homo sapiens
tgcttcaggaccttgtttgtcgaag

SEQ ID NO: 2413 - DNA, 25 bp, Homo sapiens
ttccttaggacggaaccgcaggcac

SEQ ID NO: 2414 - DNA, 25 bp, Homo sapiens
ttgtcgaagatgttggtttcccttt

SEQ ID NO: 2415 - DNA, 25 bp, Homo sapiens
aagagaatgttcctactcacacttc

SEQ ID NO: 2416 - DNA, 25 bp, Homo sapiens
acagtggtgacatagtctctgccct

SEQ ID NO: 2417 - DNA, 25 bp, Homo sapiens
agaacatatgttgcaagaccctccc

SEQ ID NO: 2418 - DNA, 25 bp, Homo sapiens
ataaccgcttggtttgcaacctctt

SEQ ID NO: 2419 - DNA, 25 bp, Homo sapiens
atccatccttccaacatatatttat

SEQ ID NO: 2420 - DNA, 25 bp, Homo sapiens
cagagctctgggttgtgcacatttc

SEQ ID NO: 2421 - DNA, 25 bp, Homo sapiens
catgggggcacttgagttttggcaa

SEQ ID NO: 2422 - DNA, 25 bp, Homo sapiens
gcaacctctttgctcaacagaacat

SEQ ID NO: 2423 - DNA, 25 bp, Homo sapiens
gttttggcaaggctgacagagctct

SEQ ID NO: 2424 - DNA, 25 bp, Homo sapiens
tctgccctcatagagttgattgtct

SEQ ID NO: 2425 - DNA, 25 bp, Homo sapiens
tgggaagactatggtgctgccttgc

SEQ ID NO: 2426 - DNA, 25 bp, Homo sapiens
aagagctatgagctgccagatgggc

SEQ ID NO: 2427 - DNA, 25 bp, Homo sapiens
agtactcagtctggatcgggggctc

SEQ ID NO: 2428 - DNA, 25 bp, Homo sapiens
atatgccaacaatgtcctctctggg

SEQ ID NO: 2429 - DNA, 25 bp, Homo sapiens
cagaacaggttctccaaggatcccc

SEQ ID NO: 2430 - DNA, 25 bp, Homo sapiens
cctttattggcatggagtccgctgg

SEQ ID NO: 2431 - DNA, 25 bp, Homo sapiens
gccctccattgtccacaggaagtgc

SEQ ID NO: 2432 - DNA, 25 bp, Homo sapiens
gtgacattgacatccgtaaggactt

SEQ ID NO: 2433 - DNA, 25 bp, Homo sapiens
tcatgagacaacctacaattccatc

SEQ ID NO: 2434 - DNA, 25 bp, Homo sapiens
tgagtatgatgaggcagggccctcc

SEQ ID NO: 2435 - DNA, 25 bp, Homo sapiens
tggagtccgctggaattcatgagac

SEQ ID NO: 2436 - DNA, 25 bp, Homo sapiens
ttgctcccccagagcggaagtactc

SEQ ID NO: 2437 - DNA, 25 bp, Homo sapiens
aaagaagcctgtttcagctgcctga

SEQ ID NO: 2438 - DNA, 25 bp, Homo sapiens
acattgcccggaaactcagtctatt

SEQ ID NO: 2439 - DNA, 25 bp, Homo sapiens
actgggcctatgtagtagcctcatt

SEQ ID NO: 2440 - DNA, 25 bp, Homo sapiens
agtctatttattcttcagcttgccc

SEQ ID NO: 2441 - DNA, 25 bp, Homo sapiens
atagcgttgttatcgccttgggttt

SEQ ID NO: 2442 - DNA, 25 bp, Homo sapiens
gaccacatatgcttgtcactgggaa

SEQ ID NO: 2443 - DNA, 25 bp, Homo sapiens
gtaactgaatccattgcgacattgt

SEQ ID NO: 2444 - DNA, 25 bp, Homo sapiens
gtatcatggcctacccgaggagaag

SEQ ID NO: 2445 - DNA, 25 bp, Homo sapiens
gtatgacaacccgggatcgtttgca

SEQ ID NO: 2446 - DNA, 25 bp, Homo sapiens
tagcctcatttaccatcgtttgtat

SEQ ID NO: 2447 - DNA, 25 bp, Homo sapiens
tgcctgaacgcagtttggatgtctt

SEQ ID NO: 2448 - DNA, 25 bp, Homo sapiens
aatcgctacttcaggaagcgccgag

SEQ ID NO: 2449 - DNA, 25 bp, Homo sapiens
actttgcgaacgctacgccatggtt

SEQ ID NO: 2450 - DNA, 25 bp, Homo sapiens
agaggatccgagaacgctctaagcc

SEQ ID NO: 2451 - DNA, 25 bp, Homo sapiens
catgaagagcctgatccttcttgcc

SEQ ID NO: 2452 - DNA, 25 bp, Homo sapiens
cctggccgccttagcggtagtaact

SEQ ID NO: 2453 - DNA, 25 bp, Homo sapiens
ctaagcctgtccacgagctcaatag

SEQ ID NO: 2454 - DNA, 25 bp, Homo sapiens
ctgacctgcaggacgaaaccatgaa

SEQ ID NO: 2455 - DNA, 25 bp, Homo sapiens
gatgactacagactttgcgaacgct

SEQ ID NO: 2456 - DNA, 25 bp, Homo sapiens
gcgccgaggggccaaatgagactga

SEQ ID NO: 2457 - DNA, 25 bp, Homo sapiens
ggcttatatacaatgcttctttcct

SEQ ID NO: 2458 - DNA, 25 bp, Homo sapiens
ggtttatggatacaatgctgcctat

SEQ ID NO: 2459 - DNA, 25 bp, Homo sapiens
cactcgccttcttagagttttattc

SEQ ID NO: 2460 - DNA, 25 bp, Homo sapiens
cagacgtctgtcaggggcttggatt

SEQ ID NO: 2461 - DNA, 25 bp, Homo sapiens
catgttgcactgtttgcatgcgccc

SEQ ID NO: 2462 - DNA, 25 bp, Homo sapiens
cccgaggcagacgtctgtcaggggc

SEQ ID NO: 2463 - DNA, 25 bp, Homo sapiens
cgtctgtcaggggcttggatttcgt

SEQ ID NO: 2464 - DNA, 25 bp, Homo sapiens
gccactcgccttcttagagttttat

SEQ ID NO: 2465 - DNA, 25 bp, Homo sapiens
gcttgaccatgttgcactgtttgca

SEQ ID NO: 2466 - DNA, 25 bp, Homo sapiens
ggagaaagaaagtacccagcaaatg

SEQ ID NO: 2467 - DNA, 25 bp, Homo sapiens
tcaggggcttggatttcgtgtgccg

SEQ ID NO: 2468 - DNA, 25 bp, Homo sapiens
tgagattttttttccgtgtgtttat

SEQ ID NO: 2469 - DNA, 25 bp, Homo sapiens
tgtttgcgcttgaccatgttgcact

SEQ ID NO: 2470 - DNA, 25 bp, Homo sapiens
aaactggtacagtgttctgcttgat

SEQ ID NO: 2471 - DNA, 25 bp, Homo sapiens
agtaaatatctttgtggtcacccac

SEQ ID NO: 2472 - DNA, 25 bp, Homo sapiens
agttgtcattaatttagtaagccta

SEQ ID NO: 2473 - DNA, 25 bp, Homo sapiens
atctttgtggtcacccacattgggt

SEQ ID NO: 2474 - DNA, 25 bp, Homo sapiens
atgaattattctttaccagttttga

SEQ ID NO: 2475 - DNA, 25 bp, Homo sapiens
atttacccctaaatggtccattctg

SEQ ID NO: 2476 - DNA, 25 bp, Homo sapiens
ggagaggtactgaatctttgatgtt

SEQ ID NO: 2477 - DNA, 25 bp, Homo sapiens
ggtaacttggaagctgtgtagtata

SEQ ID NO: 2478 - DNA, 25 bp, Homo sapiens
gtcattgttctcaagtgcaatataa

SEQ ID NO: 2479 - DNA, 25 bp, Homo sapiens
gtccattctgcattgtatttcaggc

SEQ ID NO: 2480 - DNA, 25 bp, Homo sapiens
gttctgcttgatttacaacatgtaa

SEQ ID NO: 2481 - DNA, 25 bp, Homo sapiens
aacagagaacacgtcctactacatc

SEQ ID NO: 2482 - DNA, 25 bp, Homo sapiens
actggtacaatttcacaccgctggc

SEQ ID NO: 2483 - DNA, 25 bp, Homo sapiens
ccccgtgcacaactggtacaatttc

SEQ ID NO: 2484 - DNA, 25 bp, Homo sapiens
cgacctggagatgtcgtccgatgcc

SEQ ID NO: 2485 - DNA, 25 bp, Homo sapiens
ctgctccgggtcaacggcaaatcag

SEQ ID NO: 2486 - DNA, 25 bp, Homo sapiens
gaagaagtacggcatcgtcctcaag

SEQ ID NO: 2487 - DNA, 25 bp, Homo sapiens
ggagatgcccgaatcgggcgcgggc

SEQ ID NO: 2488 - DNA, 25 bp, Homo sapiens
ggctggagcgggacttgagcaacaa

SEQ ID NO: 2489 - DNA, 25 bp, Homo sapiens
gggcgcgggcagtgagttcaaccgc

SEQ ID NO: 2490 - DNA, 25 bp, Homo sapiens
gtccgatgccagtgatgccagtggt

SEQ ID NO: 2491 - DNA, 25 bp, Homo sapiens
gttcaaccgcaagcttcgggaggag

SEQ ID NO: 2492 - DNA, 25 bp, Homo sapiens
aagttggtgtaatcagctggggagt

SEQ ID NO: 2493 - DNA, 25 bp, Homo sapiens
actcggaaggaggtctacatcaaga

SEQ ID NO: 2494 - DNA, 25 bp, Homo sapiens
actttcacatcaacctctttcaagt

SEQ ID NO: 2495 - DNA, 25 bp, Homo sapiens
caactaccacttgccagcaacaaaa

SEQ ID NO: 2496 - DNA, 25 bp, Homo sapiens
cagactatcaggcccatttgtctcc

SEQ ID NO: 2497 - DNA, 25 bp, Homo sapiens
ccctgcacaggatatcaaagctctg

SEQ ID NO: 2498 - DNA, 25 bp, Homo sapiens
gaacaactcgagctttgaggcttcc

SEQ ID NO: 2499 - DNA, 25 bp, Homo sapiens
gaagtcgtttcattcaagttggtgt

SEQ ID NO: 2500 - DNA, 25 bp, Homo sapiens
gctctgtttgtgtctgaggaggaga

SEQ ID NO: 2501 - DNA, 25 bp, Homo sapiens
gctggggagtagtggatgtctgcaa

SEQ ID NO: 2502 - DNA, 25 bp, Homo sapiens
tcccctgcaccgagggaacaactcg

SEQ ID NO: 2503 - DNA, 25 bp, Homo sapiens
aaatcccagaattttgttccaccat

SEQ ID NO: 2504 - DNA, 25 bp, Homo sapiens
acagctcttttaatacaatttcctt

SEQ ID NO: 2505 - DNA, 25 bp, Homo sapiens
acatccaagagcccattctacaagt

SEQ ID NO: 2506 - DNA, 25 bp, Homo sapiens
caggatgccactcacatttttttct

SEQ ID NO: 2507 - DNA, 25 bp, Homo sapiens
gaatgcttttccacgtagacttatc

SEQ ID NO: 2508 - DNA, 25 bp, Homo sapiens
gacccacgctgtacaagtaacatcc

SEQ ID NO: 2509 - DNA, 25 bp, Homo sapiens
gagagcccatcaaatcctgagtgtc

SEQ ID NO: 2510 - DNA, 25 bp, Homo sapiens
gtcagtttgttgtccctattgtaga

SEQ ID NO: 2511 - DNA, 25 bp, Homo sapiens
gttccaccatggttagttatttgcc

SEQ ID NO: 2512 - DNA, 25 bp, Homo sapiens
tgacaacgtgtctgtccaggtctgt

SEQ ID NO: 2513 - DNA, 25 bp, Homo sapiens
ttcctacccacagcagcaaatgaca

SEQ ID NO: 2514 - DNA, 25 bp, Homo sapiens
acctgaacgacatacttctccagct

SEQ ID NO: 2515 - DNA, 25 bp, Homo sapiens
agcagtggggctctcagtaaggaac

SEQ ID NO: 2516 - DNA, 25 bp, Homo sapiens
aggtggtccataaggtcgtgtctga

SEQ ID NO: 2517 - DNA, 25 bp, Homo sapiens
ccctgtctgcttatccttggaaggt

SEQ ID NO: 2518 - DNA, 25 bp, Homo sapiens
gcccatggactcttcagtctggagg

SEQ ID NO: 2519 - DNA, 25 bp, Homo sapiens
ggaccattgtgcgtttcaacaggcc

SEQ ID NO: 2520 - DNA, 25 bp, Homo sapiens
gtgacagcgattccctgtgaagctc

SEQ ID NO: 2521 - DNA, 25 bp, Homo sapiens
tcattgtccctacagacacccagaa

SEQ ID NO: 2522 - DNA, 25 bp, Homo sapiens
tgagcaaagtcaccaatcccagcaa

SEQ ID NO: 2523 - DNA, 25 bp, Homo sapiens
tgcaccgtagtggccatggcatgtg

SEQ ID NO: 2524 - DNA, 25 bp, Homo sapiens
ttcaacaggcccttcctgatgatca

SEQ ID NO: 2525 - DNA, 25 bp, Homo sapiens
aaatcccatgcttgggttttgtctt

SEQ ID NO: 2526 - DNA, 25 bp, Homo sapiens
attacctgcccattcgtcaggacac

SEQ ID NO: 2527 - DNA, 25 bp, Homo sapiens
caactcagctcctttaacgctaata

SEQ ID NO: 2528 - DNA, 25 bp, Homo sapiens
cacccagtgttatattctgcctcgc

SEQ ID NO: 2529 - DNA, 25 bp, Homo sapiens
ccacccacccagtgttatattctgc

SEQ ID NO: 2530 - DNA, 25 bp, Homo sapiens
cctgtgagtgggccattcggaacat

SEQ ID NO: 2531 - DNA, 25 bp, Homo sapiens
gagatccaaaacgcttcgaggcacc

SEQ ID NO: 2532 - DNA, 25 bp, Homo sapiens
gcccaaagagccaaattgtcacaat

SEQ ID NO: 2533 - DNA, 25 bp, Homo sapiens
gggccattcggaacattggacagaa

SEQ ID NO: 2534 - DNA, 25 bp, Homo sapiens
taacgctaatatttccggcaaaatc

SEQ ID NO: 2535 - DNA, 25 bp, Homo sapiens
tggaacccacattggcctgagatcc

SEQ ID NO: 2536 - DNA, 25 bp, Homo sapiens
agcacagcagcatcttcaaacatgt

SEQ ID NO: 2537 - DNA, 25 bp, Homo sapiens
caaaactgccgcaagtctgcagccc

SEQ ID NO: 2538 - DNA, 25 bp, Homo sapiens
cagataccccgtgggcaagttcttc

SEQ ID NO: 2539 - DNA, 25 bp, Homo sapiens
caggttccatcccgaaaatctctcg

SEQ ID NO: 2540 - DNA, 25 bp, Homo sapiens
cccccagagatggccagcaatcgga

SEQ ID NO: 2541 - DNA, 25 bp, Homo sapiens
cccctccatcgggctgaggaagcac

SEQ ID NO: 2542 - DNA, 25 bp, Homo sapiens
cctgaccacggacgtttccatcagg

SEQ ID NO: 2543 - DNA, 25 bp, Homo sapiens
gcaagttcttccaatatgacacctg

SEQ ID NO: 2544 - DNA, 25 bp, Homo sapiens
ggagctcgaggcgttcagggaggcc

SEQ ID NO: 2545 - DNA, 25 bp, Homo sapiens
tatgacacctggaagcagtccaccc

SEQ ID NO: 2546 - DNA, 25 bp, Homo sapiens
tccgagagggacgtgtcgacccctc

SEQ ID NO: 2547 - DNA, 25 bp, Homo sapiens
caagatgatgtccgcggcggccatt

SEQ ID NO: 2548 - DNA, 25 bp, Homo sapiens
ccaaagtggtcagggtggcctctgg

SEQ ID NO: 2549 - DNA, 25 bp, Homo sapiens
ccaatgggggtggagttgcctcggg

SEQ ID NO: 2550 - DNA, 25 bp, Homo sapiens
ccctggccaggattgctacagttgt

SEQ ID NO: 2551 - DNA, 25 bp, Homo sapiens
gactctccggattgaccaagttcat

SEQ ID NO: 2552 - DNA, 25 bp, Homo sapiens
gagccaactatcccaaatatacctg

SEQ ID NO: 2553 - DNA, 25 bp, Homo sapiens
gccacggaattaacccgagcaggca

SEQ ID NO: 2554 - DNA, 25 bp, Homo sapiens
gttgaggatctcttactctctaagc

SEQ ID NO: 2555 - DNA, 25 bp, Homo sapiens
tctcacctcatcagcagtgaccagt

SEQ ID NO: 2556 - DNA, 25 bp, Homo sapiens
tctgccattgcggctgtcattgcga

SEQ ID NO: 2557 - DNA, 25 bp, Homo sapiens
ttggaggagttgtggccatggcggc

SEQ ID NO: 2558 - DNA, 25 bp, Homo sapiens
acagcactgcaaataacccatcttc

SEQ ID NO: 2559 - DNA, 25 bp, Homo sapiens
accctctggccgggtaataggcctg

SEQ ID NO: 2560 - DNA, 25 bp, Homo sapiens
acttccccaccggatggacagttat

SEQ ID NO: 2561 - DNA, 25 bp, Homo sapiens
caaagcgggaatcatgtgcccctca

SEQ ID NO: 2562 - DNA, 25 bp, Homo sapiens
cccgggagtgtccaagacagcctgg

SEQ ID NO: 2563 - DNA, 25 bp, Homo sapiens
ccggcagctgtcaccatgtgattta

SEQ ID NO: 2564 - DNA, 25 bp, Homo sapiens
gaccagcagaactgtacctgttgag

SEQ ID NO: 2565 - DNA, 25 bp, Homo sapiens
gccggaagcagattgaccagcagaa

SEQ ID NO: 2566 - DNA, 25 bp, Homo sapiens
gtggttcccagggatgggcctgtac

SEQ ID NO: 2567 - DNA, 25 bp, Homo sapiens
gttgaggcacttttgtttcttgggc

SEQ ID NO: 2568 - DNA, 25 bp, Homo sapiens
tagaagccaccggatggcacttccc

SEQ ID NO: 2569 - DNA, 25 bp, Homo sapiens
aactttgtctaatttcttactctat

SEQ ID NO: 2570 - DNA, 25 bp, Homo sapiens
agtagcttatttgctctgggggcca

SEQ ID NO: 2571 - DNA, 25 bp, Homo sapiens
gaaaggccttttattctgttactgg

SEQ ID NO: 2572 - DNA, 25 bp, Homo sapiens
gaacatgttttcctactgcattggg

SEQ ID NO: 2573 - DNA, 25 bp, Homo sapiens
gcagttggatgttcttgcctctgac

SEQ ID NO: 2574 - DNA, 25 bp, Homo sapiens
ggggcatgatggggattgctgcata

SEQ ID NO: 2575 - DNA, 25 bp, Homo sapiens
gttcttgcctctgacagtagcttat

SEQ ID NO: 2576 - DNA, 25 bp, Homo sapiens
taaacacctcttttgggtatgcctt

SEQ ID NO: 2577 - DNA, 25 bp, Homo sapiens
taatgttttgctactcttgtcagac

SEQ ID NO: 2578 - DNA, 25 bp, Homo sapiens
tattcagtgaccacttcctgttcac

SEQ ID NO: 2579 - DNA, 25 bp, Homo sapiens
ttgtacgtttacagtcgcagcacta

SEQ ID NO: 2580 - DNA, 25 bp, Homo sapiens
aattgtgctgaggcaactatggcat

SEQ ID NO: 2581 - DNA, 25 bp, Homo sapiens
acattgttcatctttagtgcacttt

SEQ ID NO: 2582 - DNA, 25 bp, Homo sapiens
agaaatttgtatacccacgcttcag

SEQ ID NO: 2583 - DNA, 25 bp, Homo sapiens
agatgttctcgatacagtctggcaa

SEQ ID NO: 2584 - DNA, 25 bp, Homo sapiens
ccacgcttcagctactatctaatca

SEQ ID NO: 2585 - DNA, 25 bp, Homo sapiens
gatgccctatctatctgctaaagca

SEQ ID NO: 2586 - DNA, 25 bp, Homo sapiens
gctactatctaatcatcacccgaag

SEQ ID NO: 2587 - DNA, 25 bp, Homo sapiens
ggcaaagactatcccaaggttattt

SEQ ID NO: 2588 - DNA, 25 bp, Homo sapiens
ggcaattagcgatatagcataccca

SEQ ID NO: 2589 - DNA, 25 bp, Homo sapiens
taggctactaagtgcattttcatca

SEQ ID NO: 2590 - DNA, 25 bp, Homo sapiens
tgtggatatttctccatcctaaaaa

SEQ ID NO: 2591 - DNA, 25 bp, Homo sapiens
aatgccttagctgggacgcatagct

SEQ ID NO: 2592 - DNA, 25 bp, Homo sapiens
aatgtaattttatccctcatgtata

SEQ ID NO: 2593 - DNA, 25 bp, Homo sapiens
agaggagagggctcctgtgacggcg

SEQ ID NO: 2594 - DNA, 25 bp, Homo sapiens
gaaaccgccgcaatgggggtgtctt

SEQ ID NO: 2595 - DNA, 25 bp, Homo sapiens
gaaagcttcgtccgagaaacgccag

SEQ ID NO: 2596 - DNA, 25 bp, Homo sapiens
gactgtgaagtggcttctccgtacg

SEQ ID NO: 2597 - DNA, 25 bp, Homo sapiens
gcgaggcttgggaggaaaccgccgc

SEQ ID NO: 2598 - DNA, 25 bp, Homo sapiens
ttaaagccttgctctgttgtgtcct

SEQ ID NO: 2599 - DNA, 25 bp, Homo sapiens
ttcccaatccttagcaatgccttag

SEQ ID NO: 2600 - DNA, 25 bp, Homo sapiens
ttctccgtacgattgtctctgaaac

SEQ ID NO: 2601 - DNA, 25 bp, Homo sapiens
ttggatatggcggggggagggctgg

SEQ ID NO: 2602 - DNA, 25 bp, Homo sapiens
catcatactaaacttcacctacatt

SEQ ID NO: 2603 - DNA, 25 bp, Homo sapiens
ctctcaggctcttgactacttggaa

SEQ ID NO: 2604 - DNA, 25 bp, Homo sapiens
cttatggtatgtagccagctgtgca

SEQ ID NO: 2605 - DNA, 25 bp, Homo sapiens
cttcttcacaggcactcctggagat

SEQ ID NO: 2606 - DNA, 25 bp, Homo sapiens
gaaggattactctccatatcccttc

SEQ ID NO: 2607 - DNA, 25 bp, Homo sapiens
ggaactaggctcttatgtgtgcctt

SEQ ID NO: 2608 - DNA, 25 bp, Homo sapiens
taaacttcacctacattatctcact

SEQ ID NO: 2609 - DNA, 25 bp, Homo sapiens
tcagcacttaactatgagccaggca

SEQ ID NO: 2610 - DNA, 25 bp, Homo sapiens
tggtttatgactcttaaccccctag

SEQ ID NO: 2611 - DNA, 25 bp, Homo sapiens
ttaaccccctagaaagacagaagct

SEQ ID NO: 2612 - DNA, 25 bp, Homo sapiens
tttgtttcccatcagactgtcaaga

SEQ ID NO: 2613 - DNA, 25 bp, Homo sapiens
aatcatgtttattttgagtcctagg

SEQ ID NO: 2614 - DNA, 25 bp, Homo sapiens
agctgagcttttgatgccaggtgca

SEQ ID NO: 2615 - DNA, 25 bp, Homo sapiens
atcaagcaggaccctaagatgaagc

SEQ ID NO: 2616 - DNA, 25 bp, Homo sapiens
atcttgtcgcgagctgctgatacag

SEQ ID NO: 2617 - DNA, 25 bp, Homo sapiens
ccaatgcctttttagatgtattttt

SEQ ID NO: 2618 - DNA, 25 bp, Homo sapiens
gaaaggggacacctgtacattcttc

SEQ ID NO: 2619 - DNA, 25 bp, Homo sapiens
gatcaggtaactttcgaccgacttt

SEQ ID NO: 2620 - DNA, 25 bp, Homo sapiens
gatgccaggtgcaatctactggaaa

SEQ ID NO: 2621 - DNA, 25 bp, Homo sapiens
gcactgatggcagacatcttgtcgc

SEQ ID NO: 2622 - DNA, 25 bp, Homo sapiens
gtacccgagcacatagagcttttta

SEQ ID NO: 2623 - DNA, 25 bp, Homo sapiens
tactggaaatgtagcacttacgtaa

SEQ ID NO: 2624 - DNA, 25 bp, Homo sapiens
aattgggtggaggaccgttctctgt

SEQ ID NO: 2625 - DNA, 25 bp, Homo sapiens
aggtcctgtctctgcacagaaactt

SEQ ID NO: 2626 - DNA, 25 bp, Homo sapiens
atctcacctctcgcaagagggtctc

SEQ ID NO: 2627 - DNA, 25 bp, Homo sapiens
ctgctgggactcctttgcatggcag

SEQ ID NO: 2628 - DNA, 25 bp, Homo sapiens
gcacagaaacttgaactccaggatg

SEQ ID NO: 2629 - DNA, 25 bp, Homo sapiens
gccagcgctctgacatgcagaaggt

SEQ ID NO: 2630 - DNA, 25 bp, Homo sapiens
gggcctgcttgtgttcctggcaggc

SEQ ID NO: 2631 - DNA, 25 bp, Homo sapiens
tcatctgcgctggggttctgtgcgc

SEQ ID NO: 2632 - DNA, 25 bp, Homo sapiens
tcctttctactatgactggcacagc

SEQ ID NO: 2633 - DNA, 25 bp, Homo sapiens
tctgtgcgccatgggcatcatcatc

SEQ ID NO: 2634 - DNA, 25 bp, Homo sapiens
tttcctgtcctggacgccaatgacc

SEQ ID NO: 2635 - DNA, 25 bp, Homo sapiens
actcaccatttaatcatttccagca

SEQ ID NO: 2636 - DNA, 25 bp, Homo sapiens
acttctaaatcataatcatcctttt

SEQ ID NO: 2637 - DNA, 25 bp, Homo sapiens
atttcccctgtggtttgttatcagt

SEQ ID NO: 2638 - DNA, 25 bp, Homo sapiens
gagctatgcacaccaaattgctgag

SEQ ID NO: 2639 - DNA, 25 bp, Homo sapiens
gatggatttgacacactcaccattt

SEQ ID NO: 2640 - DNA, 25 bp, Homo sapiens
gcatgctcagtattgagacactgtc

SEQ ID NO: 2641 - DNA, 25 bp, Homo sapiens
gcttttgatggctacgttttggaga

SEQ ID NO: 2642 - DNA, 25 bp, Homo sapiens
gtaatattaaattcctcctgtctcc

SEQ ID NO: 2643 - DNA, 25 bp, Homo sapiens
taaggctgactcttactaaccacca

SEQ ID NO: 2644 - DNA, 25 bp, Homo sapiens
tacaattctttgttgcttaatctag

SEQ ID NO: 2645 - DNA, 25 bp, Homo sapiens
tgtcacttttttcctgtcaatatat

SEQ ID NO: 2646 - DNA, 25 bp, Homo sapiens
ctttgagcaactgtgcacgcttcag

SEQ ID NO: 2647 - DNA, 25 bp, Homo sapiens
ggaagttcgccttttacacagaaga

SEQ ID NO: 2648 - DNA, 25 bp, Homo sapiens
ggagtccaattcatagcctaaaact

SEQ ID NO: 2649 - DNA, 25 bp, Homo sapiens
ggtttggccagtgtattactctcaa

SEQ ID NO: 2650 - DNA, 25 bp, Homo sapiens
tctacttgagcaacactatcgtgtc

SEQ ID NO: 2651 - DNA, 25 bp, Homo sapiens
tgaggccatgttcaggtgctaagga

SEQ ID NO: 2652 - DNA, 25 bp, Homo sapiens
tgtattactctcaagtccttttctc

SEQ ID NO: 2653 - DNA, 25 bp, Homo sapiens
ttcattttttcctcaacattcttaa

SEQ ID NO: 2654 - DNA, 25 bp, Homo sapiens
tttacccacaatagctgcctatttt

SEQ ID NO: 2655 - DNA, 25 bp, Homo sapiens
tttctcaatcaacttctatcatcaa

SEQ ID NO: 2656 - DNA, 25 bp, Homo sapiens
ttttttcccaggacatttgctagga

SEQ ID NO: 2657 - DNA, 25 bp, Homo sapiens
aaatagcagagccccacttaactcc

SEQ ID NO: 2658 - DNA, 25 bp, Homo sapiens
agctctgttttgaagcctgcaatgt

SEQ ID NO: 2659 - DNA, 25 bp, Homo sapiens
gacttggggctgtgatgcccttcag

SEQ ID NO: 2660 - DNA, 25 bp, Homo sapiens
gagcagtgtgagctcatctcaccag

SEQ ID NO: 2661 - DNA, 25 bp, Homo sapiens
gcctgtgtgtgaacctgggggccat

SEQ ID NO: 2662 - DNA, 25 bp, Homo sapiens
gtggagaatttcttacccagacttg

SEQ ID NO: 2663 - DNA, 25 bp, Homo sapiens
tccagttctcctcagcaaagcaaat

SEQ ID NO: 2664 - DNA, 25 bp, Homo sapiens
tcccagcatctgtgagcgtctgttg

SEQ ID NO: 2665 - DNA, 25 bp, Homo sapiens
tgcagtgaggctctctgggtgaggc

SEQ ID NO: 2666 - DNA, 25 bp, Homo sapiens
tgcccttcagtgcgtggtgagtgca

SEQ ID NO: 2667 - DNA, 25 bp, Homo sapiens
tggtgagtgcagcgtgtgtgcgtgt

SEQ ID NO: 2668 - DNA, 25 bp, Homo sapiens
acctttgtgcagcttcgaggacagg

SEQ ID NO: 2669 - DNA, 25 bp, Homo sapiens
agactgatgagcacatctctctgcc

SEQ ID NO: 2670 - DNA, 25 bp, Homo sapiens
ctcagcgagcactgagctggcccta

SEQ ID NO: 2671 - DNA, 25 bp, Homo sapiens
gagagtcaggagttttactgcctgt

SEQ ID NO: 2672 - DNA, 25 bp, Homo sapiens
gatggatgcatcacactcaaggaca

SEQ ID NO: 2673 - DNA, 25 bp, Homo sapiens
gcctgcccagactgatgagcacatc

SEQ ID NO: 2674 - DNA, 25 bp, Homo sapiens
gtgctttttgggaccatcactgaga

SEQ ID NO: 2675 - DNA, 25 bp, Homo sapiens
tactgcctgtagcaatggccagagc

SEQ ID NO: 2676 - DNA, 25 bp, Homo sapiens
tggccctacttccaggatggatgca

SEQ ID NO: 2677 - DNA, 25 bp, Homo sapiens
ttgagcccattcttctgggtgtgct

SEQ ID NO: 2678 - DNA, 25 bp, Homo sapiens
ttggccgagctcctggggagctcct

SEQ ID NO: 2679 - DNA, 25 bp, Homo sapiens
aatgtattgtaatctttcatccaaa

SEQ ID NO: 2680 - DNA, 25 bp, Homo sapiens
acgtcttagagccttttatctgcag

SEQ ID NO: 2681 - DNA, 25 bp, Homo sapiens
cagattgtcttgcaacttcagtttt

SEQ ID NO: 2682 - DNA, 25 bp, Homo sapiens
gaagttctcaaagttaattcaccta

SEQ ID NO: 2683 - DNA, 25 bp, Homo sapiens
gagaatcccttaaaattaccagaca

SEQ ID NO: 2684 - DNA, 25 bp, Homo sapiens
gagccttttatctgcagaacatcga

SEQ ID NO: 2685 - DNA, 25 bp, Homo sapiens
gatgaagtatacttttcccctgtta

SEQ ID NO: 2686 - DNA, 25 bp, Homo sapiens
gtatttctaggcacaaggttggttg

SEQ ID NO: 2687 - DNA, 25 bp, Homo sapiens
gtgccatgtgggtgagttaatttta

SEQ ID NO: 2688 - DNA, 25 bp, Homo sapiens
ttacgtttgttattcctagtggatg

SEQ ID NO: 2689 - DNA, 25 bp, Homo sapiens
tttcttttccttcattcatagggaa

SEQ ID NO: 2690 - DNA, 25 bp, Homo sapiens
aacctgggcacgggcacaggctatt

SEQ ID NO: 2691 - DNA, 25 bp, Homo sapiens
aagatcccgtacaaggtggtggcac

SEQ ID NO: 2692 - DNA, 25 bp, Homo sapiens
aggatgtgtgaggatctctggcgct

SEQ ID NO: 2693 - DNA, 25 bp, Homo sapiens
caggcactcatttatattgctctga

SEQ ID NO: 2694 - DNA, 25 bp, Homo sapiens
caggcatgaggccaaggctccactg

SEQ ID NO: 2695 - DNA, 25 bp, Homo sapiens
ccagcctctggaggaactcagggcc

SEQ ID NO: 2696 - DNA, 25 bp, Homo sapiens
ctttggcacgcaagcctgaggaccc

SEQ ID NO: 2697 - DNA, 25 bp, Homo sapiens
gcagaatccttcaggctttggcacg

SEQ ID NO: 2698 - DNA, 25 bp, Homo sapiens
gtgagtgagggggcaaggctctggc

SEQ ID NO: 2699 - DNA, 25 bp, Homo sapiens
gtgatgtggcagcctgttacgccaa

SEQ ID NO: 2700 - DNA, 25 bp, Homo sapiens
taactcttatcttccacagggtcca

SEQ ID NO: 2701 - DNA, 25 bp, Homo sapiens
aaaggggacttgagggcctgagcag

SEQ ID NO: 2702 - DNA, 25 bp, Homo sapiens
caccagggtctacgtccgagagtga

SEQ ID NO: 2703 - DNA, 25 bp, Homo sapiens
ccccaagacctcgtggaccagagaa

SEQ ID NO: 2704 - DNA, 25 bp, Homo sapiens
cctttgtccctgtagcctatacagt

SEQ ID NO: 2705 - DNA, 25 bp, Homo sapiens
gacggcggatgacgttgtgtgcacc

SEQ ID NO: 2706 - DNA, 25 bp, Homo sapiens
gagcagggtctctctaaaggggact

SEQ ID NO: 2707 - DNA, 25 bp, Homo sapiens
gtgagtggccacaggtagaaccgcg

SEQ ID NO: 2708 - DNA, 25 bp, Homo sapiens
taccccagtcacttctgggggtcac

SEQ ID NO: 2709 - DNA, 25 bp, Homo sapiens
tggctgcaagagcccagatcaccca

SEQ ID NO: 2710 - DNA, 25 bp, Homo sapiens
tgggaggccctgtaagagcctggtg

SEQ ID NO: 2711 - DNA, 25 bp, Homo sapiens
tggggaactgatcctgaccatgacg

SEQ ID NO: 2712 - DNA, 25 bp, Homo sapiens
atcaaggctaggaggctcgaccacc

SEQ ID NO: 2713 - DNA, 25 bp, Homo sapiens
atcacttgccaatgtacataccttg

SEQ ID NO: 2714 - DNA, 25 bp, Homo sapiens
atttttttcaactgccaatcaaggc

SEQ ID NO: 2715 - DNA, 25 bp, Homo sapiens
cttgcaggcaaacttggctctcaat

SEQ ID NO: 2716 - DNA, 25 bp, Homo sapiens
gaatattattatgtgccccgtgttc

SEQ ID NO: 2717 - DNA, 25 bp, Homo sapiens
gagatcatatcctcagaccaggtgg

SEQ ID NO: 2718 - DNA, 25 bp, Homo sapiens
gcattttcttcacttgcaggcaaac

SEQ ID NO: 2719 - DNA, 25 bp, Homo sapiens
gctcgaccacctcaacattggagac

SEQ ID NO: 2720 - DNA, 25 bp, Homo sapiens
ggtattcagtggtccaggattctgt

SEQ ID NO: 2721 - DNA, 25 bp, Homo sapiens
tacgtacactgtacttctgtgtgca

SEQ ID NO: 2722 - DNA, 25 bp, Homo sapiens
tgttcttcgttgctgcattttcttc

SEQ ID NO: 2723 - DNA, 25 bp, Homo sapiens
aaagccgcccaacagtaatgagatg

SEQ ID NO: 2724 - DNA, 25 bp, Homo sapiens
acagactgcctgtaggtatagtgca

SEQ ID NO: 2725 - DNA, 25 bp, Homo sapiens
atctctcttgatattgcagcatcca

SEQ ID NO: 2726 - DNA, 25 bp, Homo sapiens
cattgtacatacatctctcttgata

SEQ ID NO: 2727 - DNA, 25 bp, Homo sapiens
ccatataaatcactcttttggaaca

SEQ ID NO: 2728 - DNA, 25 bp, Homo sapiens
gagatgttctcatccttgattctcc

SEQ ID NO: 2729 - DNA, 25 bp, Homo sapiens
gcagcatccatactggctttgtaat

SEQ ID NO: 2730 - DNA, 25 bp, Homo sapiens
gtatgtctatagctaattcacgttt

SEQ ID NO: 2731 - DNA, 25 bp, Homo sapiens
taaatgagtaccaaagccgcccaac

SEQ ID NO: 2732 - DNA, 25 bp, Homo sapiens
tcccagcctcaaacaacacagctta

SEQ ID NO: 2733 - DNA, 25 bp, Homo sapiens
ttcccttgctcagaaagtacctgta

SEQ ID NO: 2734 - DNA, 25 bp, Homo sapiens
aagagccctgggcggaaaagcaagg

SEQ ID NO: 2735 - DNA, 25 bp, Homo sapiens
caaggagccagctaagactcagccc

SEQ ID NO: 2736 - DNA, 25 bp, Homo sapiens
cccaaggggcgcagcagcagcgcct

SEQ ID NO: 2737 - DNA, 25 bp, Homo sapiens
ccgccacggccgcagaaaagtacaa

SEQ ID NO: 2738 - DNA, 25 bp, Homo sapiens
ctgactttacacggagcggattgca

SEQ ID NO: 2739 - DNA, 25 bp, Homo sapiens
gacgcccgtgaccgagagagttagc

SEQ ID NO: 2740 - DNA, 25 bp, Homo sapiens
gaggctcactggagagcgacggctg

SEQ ID NO: 2741 - DNA, 25 bp, Homo sapiens
ggactgaagacctgtaagagccctg

SEQ ID NO: 2742 - DNA, 25 bp, Homo sapiens
gggagggagagcgcaaagacattgt

SEQ ID NO: 2743 - DNA, 25 bp, Homo sapiens
tgtctcttctccttatgggtagggc

SEQ ID NO: 2744 - DNA, 25 bp, Homo sapiens
ttcatcctccatgccaaggccaaac

SEQ ID NO: 2745 - DNA, 25 bp, Homo sapiens
aaagtgccacattcggggctatttt

SEQ ID NO: 2746 - DNA, 25 bp, Homo sapiens
aaggctctaataagccacggtggca

SEQ ID NO: 2747 - DNA, 25 bp, Homo sapiens
acataagtgactacaaggctctaat

SEQ ID NO: 2748 - DNA, 25 bp, Homo sapiens
atgagactatttatacccaaggata

SEQ ID NO: 2749 - DNA, 25 bp, Homo sapiens
catttccacaatttcctatatccag

SEQ ID NO: 2750 - DNA, 25 bp, Homo sapiens
gatgtgtttcacttatgctgttgtg

SEQ ID NO: 2751 - DNA, 25 bp, Homo sapiens
gccacggtggcaggaggttcaagcg

SEQ ID NO: 2752 - DNA, 25 bp, Homo sapiens
gttcaagcggttctgttcactaaat

SEQ ID NO: 2753 - DNA, 25 bp, Homo sapiens
taagagtccagctttttcatttcca

SEQ ID NO: 2754 - DNA, 25 bp, Homo sapiens
tgaagaaccttatagggccttctaa

SEQ ID NO: 2755 - DNA, 25 bp, Homo sapiens
ttttctcctgtaagctttgaatgga

SEQ ID NO: 2756 - DNA, 25 bp, Homo sapiens
aaaatgcacccaactagctctatgt

SEQ ID NO: 2757 - DNA, 25 bp, Homo sapiens
cactggttgcacttatgatttcatg

SEQ ID NO: 2758 - DNA, 25 bp, Homo sapiens
caggggtggctgcctcatttagaga

SEQ ID NO: 2759 - DNA, 25 bp, Homo sapiens
ctcagcagctggtaatcttgctctg

SEQ ID NO: 2760 - DNA, 25 bp, Homo sapiens
gacccgtccatttggcaggggtggc

SEQ ID NO: 2761 - DNA, 25 bp, Homo sapiens
gagaccattgcaatgaatccccaat

SEQ ID NO: 2762 - DNA, 25 bp, Homo sapiens
gattctccactcagttgcaacttgg

SEQ ID NO: 2763 - DNA, 25 bp, Homo sapiens
gcaacttggacttgtcctcagcagc

SEQ ID NO: 2764 - DNA, 25 bp, Homo sapiens
tcatgtgcggggatcatctgccgtg

SEQ ID NO: 2765 - DNA, 25 bp, Homo sapiens
tcttgctctgcttgacaacatctga

SEQ ID NO: 2766 - DNA, 25 bp, Homo sapiens
tgtactcttagatggattctccact

SEQ ID NO: 2767 - DNA, 25 bp, Homo sapiens
agtacaggggtgctgcaggtggcag

SEQ ID NO: 2768 - DNA, 25 bp, Homo sapiens
agtggaagaaacaccctttcatctc

SEQ ID NO: 2769 - DNA, 25 bp, Homo sapiens
cctccccagtacaggggtgctgcag

SEQ ID NO: 2770 - DNA, 25 bp, Homo sapiens
gagcttttgtgtgcctggtagaaac

SEQ ID NO: 2771 - DNA, 25 bp, Homo sapiens
ggaactacggggcttacaggagctt

SEQ ID NO: 2772 - DNA, 25 bp, Homo sapiens
gggcttacaggagcttttgtgtgcc

SEQ ID NO: 2773 - DNA, 25 bp, Homo sapiens
gtaggtgacttgtttactcattgaa

SEQ ID NO: 2774 - DNA, 25 bp, Homo sapiens
gtgtgcatgggttattttggagtgt

SEQ ID NO: 2775 - DNA, 25 bp, Homo sapiens
tatttatcatatccttgcccttgag

SEQ ID NO: 2776 - DNA, 25 bp, Homo sapiens
tatttctgttccagtcacattgcca

SEQ ID NO: 2777 - DNA, 25 bp, Homo sapiens
tcatctcagagtccactgtggcact

SEQ ID NO: 2778 - DNA, 25 bp, Homo sapiens
aaattgaccatacaatttcatcctc

SEQ ID NO: 2779 - DNA, 25 bp, Homo sapiens
agcagtggacacgtgaggggggggt

SEQ ID NO: 2780 - DNA, 25 bp, Homo sapiens
agctcggattcaactaccttagata

SEQ ID NO: 2781 - DNA, 25 bp, Homo sapiens
atgcaaggggctgcatgacctacca

SEQ ID NO: 2782 - DNA, 25 bp, Homo sapiens
ctgaaaacctaccagccagagggta

SEQ ID NO: 2783 - DNA, 25 bp, Homo sapiens
gactcacttcaatgtgtcatttccg

SEQ ID NO: 2784 - DNA, 25 bp, Homo sapiens
gagacaggcagctcggattcaacta

SEQ ID NO: 2785 - DNA, 25 bp, Homo sapiens
gagtggtttccaatgtgttcaatag

SEQ ID NO: 2786 - DNA, 25 bp, Homo sapiens
tcatttccggctgctgtgtgtgagc

SEQ ID NO: 2787 - DNA, 25 bp, Homo sapiens
tgacctaccaggacagaactttccc

SEQ ID NO: 2788 - DNA, 25 bp, Homo sapiens
tgaggggggggtgggtgagagagac

SEQ ID NO: 2789 - DNA, 25 bp, Homo sapiens
aagacatatgccatgcagctacacc

SEQ ID NO: 2790 - DNA, 25 bp, Homo sapiens
atagccccaccatgaggacatacaa

SEQ ID NO: 2791 - DNA, 25 bp, Homo sapiens
caaaacacaaaggcccacacttcct

SEQ ID NO: 2792 - DNA, 25 bp, Homo sapiens
cagcatttggggccatggtacctgc

SEQ ID NO: 2793 - DNA, 25 bp, Homo sapiens
cagcttgggcactgctgtctactga

SEQ ID NO: 2794 - DNA, 25 bp, Homo sapiens
cagggcattgtcctcagtcagatac

SEQ ID NO: 2795 - DNA, 25 bp, Homo sapiens
gaaacttgctgcctattgggtatgc

SEQ ID NO: 2796 - DNA, 25 bp, Homo sapiens
gaccccaacccttgatgatatgtat

SEQ ID NO: 2797 - DNA, 25 bp, Homo sapiens
gccacgcatctgatctgtagtcaca

SEQ ID NO: 2798 - DNA, 25 bp, Homo sapiens
ggtacctgcacacctaaaacactag

SEQ ID NO: 2799 - DNA, 25 bp, Homo sapiens
tggccctccatagacatgtgtagca

SEQ ID NO: 2800 - DNA, 25 bp, Homo sapiens
aaggtattggaggactccctcccag

SEQ ID NO: 2801 - DNA, 25 bp, Homo sapiens
acccacatacatttctgccagtgtt

SEQ ID NO: 2802 - DNA, 25 bp, Homo sapiens
caaaactgacacctttgttagccac

SEQ ID NO: 2803 - DNA, 25 bp, Homo sapiens
cactattgcagctccagtttcctgc

SEQ ID NO: 2804 - DNA, 25 bp, Homo sapiens
gacactcagcggtcatgtctggaca

SEQ ID NO: 2805 - DNA, 25 bp, Homo sapiens
gagattacccagtgaggccttattc

SEQ ID NO: 2806 - DNA, 25 bp, Homo sapiens
gagtgcccagggaatatgcccaagc

SEQ ID NO: 2807 - DNA, 25 bp, Homo sapiens
gtatgtgtagacaagctctcgctct

SEQ ID NO: 2808 - DNA, 25 bp, Homo sapiens
gtttcctgcagtgatcagggtcctg

SEQ ID NO: 2809 - DNA, 25 bp, Homo sapiens
ttcactgggagcttgcactattgca

SEQ ID NO: 2810 - DNA, 25 bp, Homo sapiens
ttgtcctgtttgcatttcactggga

SEQ ID NO: 2811 - DNA, 25 bp, Homo sapiens
agaggctattcctaggcctcaggcc

SEQ ID NO: 2812 - DNA, 25 bp, Homo sapiens
cacctgattgtgttgggccccaggg

SEQ ID NO: 2813 - DNA, 25 bp, Homo sapiens
ccagaagtgtctggatgcccgttcc

SEQ ID NO: 2814 - DNA, 25 bp, Homo sapiens
ggagagatctaatcccttcaaggaa

SEQ ID NO: 2815 - DNA, 25 bp, Homo sapiens
ggcacctctgctgtattgatatcac

SEQ ID NO: 2816 - DNA, 25 bp, Homo sapiens
ggcacggcgtgtagggtggactgtc

SEQ ID NO: 2817 - DNA, 25 bp, Homo sapiens
ggggcccataccccatgaagaagcc

SEQ ID NO: 2818 - DNA, 25 bp, Homo sapiens
gggtcagggaggggtctagaggcta

SEQ ID NO: 2819 - DNA, 25 bp, Homo sapiens
gtgcatgcttcgctaccagaagtgt

SEQ ID NO: 2820 - DNA, 25 bp, Homo sapiens
tgaagcccaaacggctgggggccca

SEQ ID NO: 2821 - DNA, 25 bp, Homo sapiens
ttccctgcctaggagctggggaggg

SEQ ID NO: 2822 - DNA, 25 bp, Homo sapiens
acttctgactacttgttgtatctgc

SEQ ID NO: 2823 - DNA, 25 bp, Homo sapiens
attcaaccattttatagactaccaa

SEQ ID NO: 2824 - DNA, 25 bp, Homo sapiens
attggttgttgtattgatcaatgca

SEQ ID NO: 2825 - DNA, 25 bp, Homo sapiens
atttgtgctacccctttgattatgc

SEQ ID NO: 2826 - DNA, 25 bp, Homo sapiens
cttatccatctttgaacttctgact

SEQ ID NO: 2827 - DNA, 25 bp, Homo sapiens
gactacttgttgtatctgctggata

SEQ ID NO: 2828 - DNA, 25 bp, Homo sapiens
gatcaatgcatgttacccattcaac

SEQ ID NO: 2829 - DNA, 25 bp, Homo sapiens
gcatgttacccattcaaccatttta

SEQ ID NO: 2830 - DNA, 25 bp, Homo sapiens
gttttatttacttctgtatgtgtat

SEQ ID NO: 2831 - DNA, 25 bp, Homo sapiens
tgctacccctttgattatgcagaca

SEQ ID NO: 2832 - DNA, 25 bp, Homo sapiens
ttcattatttgtgctacccctttga

SEQ ID NO: 2833 - DNA, 25 bp, Homo sapiens
aatacacaagttatcctgaccctat

SEQ ID NO: 2834 - DNA, 25 bp, Homo sapiens
cattgtcttctccaaactccaagaa

SEQ ID NO: 2835 - DNA, 25 bp, Homo sapiens
gcctttttagttggctaactgacct

SEQ ID NO: 2836 - DNA, 25 bp, Homo sapiens
ggaccatgaagccagttttttcggg

SEQ ID NO: 2837 - DNA, 25 bp, Homo sapiens
ggactctattccatctatcaagggg

SEQ ID NO: 2838 - DNA, 25 bp, Homo sapiens
gggcattcattcctgagcaacttgc

SEQ ID NO: 2839 - DNA, 25 bp, Homo sapiens
gtagcagctcacataactgggacca

SEQ ID NO: 2840 - DNA, 25 bp, Homo sapiens
tcccaaacatactttcgatttcagg

SEQ ID NO: 2841 - DNA, 25 bp, Homo sapiens
tgagcacttgatagacatggaccat

SEQ ID NO: 2842 - DNA, 25 bp, Homo sapiens
tgggccgcaaaataaactcctggga

SEQ ID NO: 2843 - DNA, 25 bp, Homo sapiens
ttttactacatctattcccaaacat

SEQ ID NO: 2844 - DNA, 25 bp, Homo sapiens
aagactgtcagcttccaaacattaa

SEQ ID NO: 2845 - DNA, 25 bp, Homo sapiens
agaaagcgcaacaatccatctctca

SEQ ID NO: 2846 - DNA, 25 bp, Homo sapiens
agtgtatcacagtagtagcctccag

SEQ ID NO: 2847 - DNA, 25 bp, Homo sapiens
atccatctctcaagtagtgtatcac

SEQ ID NO: 2848 - DNA, 25 bp, Homo sapiens
atcgcagtttgcctggtgcagtggc

SEQ ID NO: 2849 - DNA, 25 bp, Homo sapiens
atgcaatggttaacatcttctgtct

SEQ ID NO: 2850 - DNA, 25 bp, Homo sapiens
ctctacctcatatcagtttgctagc

SEQ ID NO: 2851 - DNA, 25 bp, Homo sapiens
gaggcaccactaaaagatcgcagtt

SEQ ID NO: 2852 - DNA, 25 bp, Homo sapiens
taatctactccttgtaaagactgta

SEQ ID NO: 2853 - DNA, 25 bp, Homo sapiens
tcacagtagtagcctccaggtttcc

SEQ ID NO: 2854 - DNA, 25 bp, Homo sapiens
tctgtctttataatctactccttgt

SEQ ID NO: 2855 - DNA, 25 bp, Homo sapiens
agatatggcctcttacagtatttaa

SEQ ID NO: 2856 - DNA, 25 bp, Homo sapiens
atatccatcttaaagacatcaacta

SEQ ID NO: 2857 - DNA, 25 bp, Homo sapiens
atatctttttactacagtgatctgt

SEQ ID NO: 2858 - DNA, 25 bp, Homo sapiens
atgtacgaatacttgctttttcaaa

SEQ ID NO: 2859 - DNA, 25 bp, Homo sapiens
attttgtacctatattgtgcaatac

SEQ ID NO: 2860 - DNA, 25 bp, Homo sapiens
cagtgatctgtgacagcagcagctt

SEQ ID NO: 2861 - DNA, 25 bp, Homo sapiens
ctctcagatatggcctcttacagta

SEQ ID NO: 2862 - DNA, 25 bp, Homo sapiens
gatatagcaaggacatggctgattt

SEQ ID NO: 2863 - DNA, 25 bp, Homo sapiens
gtgtacaggatattcctttagtggt

SEQ ID NO: 2864 - DNA, 25 bp, Homo sapiens
gtttctacgacatggtattgcattt

SEQ ID NO: 2865 - DNA, 25 bp, Homo sapiens
ttgagtcagtgtcttacatgttaag

SEQ ID NO: 2866 - DNA, 25 bp, Homo sapiens
acgggcagcgtggggagtgctggtg

SEQ ID NO: 2867 - DNA, 25 bp, Homo sapiens
atccccaactgtgacaagcatggcc

SEQ ID NO: 2868 - DNA, 25 bp, Homo sapiens
caccgggaagctgatccagggagcc

SEQ ID NO: 2869 - DNA, 25 bp, Homo sapiens
catccggggggaccccgagtgtcat

SEQ ID NO: 2870 - DNA, 25 bp, Homo sapiens
gaaaacggagagtgcttgggtggtg

SEQ ID NO: 2871 - DNA, 25 bp, Homo sapiens
gaaccccaacaccgggaagctgatc

SEQ ID NO: 2872 - DNA, 25 bp, Homo sapiens
gagtgtcatctcttctacaatgagc

SEQ ID NO: 2873 - DNA, 25 bp, Homo sapiens
gcaagatgtctctgaacgggcagcg

SEQ ID NO: 2874 - DNA, 25 bp, Homo sapiens
gcacacccagcggatgcagtagacc

SEQ ID NO: 2875 - DNA, 25 bp, Homo sapiens
gtacaacctcaaacagtgcaagatg

SEQ ID NO: 2876 - DNA, 25 bp, Homo sapiens
tgacaagcatggcctgtacaacctc

SEQ ID NO: 2877 - DNA, 25 bp, Homo sapiens
aaaattttgttgcatcttcgtagta

SEQ ID NO: 2878 - DNA, 25 bp, Homo sapiens
ctcggacactatattaaccttactg

SEQ ID NO: 2879 - DNA, 25 bp, Homo sapiens
gaaatactctaggttgccacaccac

SEQ ID NO: 2880 - DNA, 25 bp, Homo sapiens
gaagacaccatttgtaagcactttg

SEQ ID NO: 2881 - DNA, 25 bp, Homo sapiens
gatttgagcaagtcactgccgagct

SEQ ID NO: 2882 - DNA, 25 bp, Homo sapiens
ggttgccacaccacagttttaagaa

SEQ ID NO: 2883 - DNA, 25 bp, Homo sapiens
gttactctcttctaggattctggtg

SEQ ID NO: 2884 - DNA, 25 bp, Homo sapiens
taagaagttatgctgctgctgttac

SEQ ID NO: 2885 - DNA, 25 bp, Homo sapiens
tctccttccctggaataaggcttca

SEQ ID NO: 2886 - DNA, 25 bp, Homo sapiens
tgcattgacactgctactgactcac

SEQ ID NO: 2887 - DNA, 25 bp, Homo sapiens
tgccgagcttctgagtctgcattga

SEQ ID NO: 2888 - DNA, 25 bp, Homo sapiens
aagggcactgtgtttctggaatggg

SEQ ID NO: 2889 - DNA, 25 bp, Homo sapiens
aatggatgacaattcactctcccca

SEQ ID NO: 2890 - DNA, 25 bp, Homo sapiens
acttccgcataggccaagggcactg

SEQ ID NO: 2891 - DNA, 25 bp, Homo sapiens
caaacgaaactgatgcctccaatat

SEQ ID NO: 2892 - DNA, 25 bp, Homo sapiens
ctctccccagaggcttgttacgagt

SEQ ID NO: 2893 - DNA, 25 bp, Homo sapiens
cttccagctcttacaactctgacga

SEQ ID NO: 2894 - DNA, 25 bp, Homo sapiens
gaagacagccatctttgctttcaat

SEQ ID NO: 2895 - DNA, 25 bp, Homo sapiens
gcagctatggctgttccaataccga

SEQ ID NO: 2896 - DNA, 25 bp, Homo sapiens
gccagtggctggaacctattcatta

SEQ ID NO: 2897 - DNA, 25 bp, Homo sapiens
tcaatgaatgtggctctgcgcaggc

SEQ ID NO: 2898 - DNA, 25 bp, Homo sapiens
tttcaatatttcccacgtcagtaac

SEQ ID NO: 2899 - DNA, 25 bp, Homo sapiens
aacaaccggctcctcaacaagagga

SEQ ID NO: 2900 - DNA, 25 bp, Homo sapiens
aatcgatggtagtgccacagacccc

SEQ ID NO: 2901 - DNA, 25 bp, Homo sapiens
acagactgaaatgtgctcaggccct

SEQ ID NO: 2902 - DNA, 25 bp, Homo sapiens
agagaggctgaccatcactcagttc

SEQ ID NO: 2903 - DNA, 25 bp, Homo sapiens
aggaggacaaagaccactgggacga

SEQ ID NO: 2904 - DNA, 25 bp, Homo sapiens
caaccagtagctcatggggccttgg

SEQ ID NO: 2905 - DNA, 25 bp, Homo sapiens
cacccctggatcaaccaatcgatgg

SEQ ID NO: 2906 - DNA, 25 bp, Homo sapiens
cctcacagggctgcaacaaccagta

SEQ ID NO: 2907 - DNA, 25 bp, Homo sapiens
gacctgaagacctctaacaaccggc

SEQ ID NO: 2908 - DNA, 25 bp, Homo sapiens
ggccactatgcgggtagactacgac

SEQ ID NO: 2909 - DNA, 25 bp, Homo sapiens
tgaagaggaggattcgcctgggcca

SEQ ID NO: 2910 - DNA, 25 bp, Homo sapiens
aagcccctctctgttgaagtcaggg

SEQ ID NO: 2911 - DNA, 25 bp, Homo sapiens
caccccaccatggtagccttagggt

SEQ ID NO: 2912 - DNA, 25 bp, Homo sapiens
ctcactattcccgacccaaagggtg

SEQ ID NO: 2913 - DNA, 25 bp, Homo sapiens
gacaaaagccagcatactttccctg

SEQ ID NO: 2914 - DNA, 25 bp, Homo sapiens
gagagggcctttcatggctgatcag

SEQ ID NO: 2915 - DNA, 25 bp, Homo sapiens
gagctaagtggcttcccattaacct

SEQ ID NO: 2916 - DNA, 25 bp, Homo sapiens
gctcaccagatctcaggcaggaaag

SEQ ID NO: 2917 - DNA, 25 bp, Homo sapiens
gctgggaaaccctagaccatgtcag

SEQ ID NO: 2918 - DNA, 25 bp, Homo sapiens
tagggtgctgagtgcctgatactgc

SEQ ID NO: 2919 - DNA, 25 bp, Homo sapiens
tcagaatgtctggtcctggcttggg

SEQ ID NO: 2920 - DNA, 25 bp, Homo sapiens
tgatactgcctgacaagtgcctgac

SEQ ID NO: 2921 - DNA, 25 bp, Homo sapiens
ccatctttattggctgggcagggtc

SEQ ID NO: 2922 - DNA, 25 bp, Homo sapiens
cctttgatccctaccaacattaagt

SEQ ID NO: 2923 - DNA, 25 bp, Homo sapiens
gaaggcccgtatagccatgggtgga

SEQ ID NO: 2924 - DNA, 25 bp, Homo sapiens
gcactccatgtatagtcctcttggg

SEQ ID NO: 2925 - DNA, 25 bp, Homo sapiens
gccatgtttgtggccacgatgggca

SEQ ID NO: 2926 - DNA, 25 bp, Homo sapiens
gggagtgtctagatgcctgaaaggg

SEQ ID NO: 2927 - DNA, 25 bp, Homo sapiens
taattttcatcgtggcaggtcttgc

SEQ ID NO: 2928 - DNA, 25 bp, Homo sapiens
tatgagtttggccctgccatcttta

SEQ ID NO: 2929 - DNA, 25 bp, Homo sapiens
tgagctcagcctgtgggcagggtgc

SEQ ID NO: 2930 - DNA, 25 bp, Homo sapiens
tgccctagtcatcctgggaggtgca

SEQ ID NO: 2931 - DNA, 25 bp, Homo sapiens
ttgctcctggtatggccatcagatt

SEQ ID NO: 2932 - DNA, 25 bp, Homo sapiens
aaacctgtagaatcaatttaagtgt

SEQ ID NO: 2933 - DNA, 25 bp, Homo sapiens
aaatatctctgagttctgtgtattt

SEQ ID NO: 2934 - DNA, 25 bp, Homo sapiens
agaccagaggtctagattaatactc

SEQ ID NO: 2935 - DNA, 25 bp, Homo sapiens
atggcttcggacaaaatatctctga

SEQ ID NO: 2936 - DNA, 25 bp, Homo sapiens
cagcctggcaatagaccgagctccg

SEQ ID NO: 2937 - DNA, 25 bp, Homo sapiens
gaatagcctgaacctgggaatcgga

SEQ ID NO: 2938 - DNA, 25 bp, Homo sapiens
taatttgtttccagcatgaggtatc

SEQ ID NO: 2939 - DNA, 25 bp, Homo sapiens
tgatgacaatcagttatacagttat

SEQ ID NO: 2940 - DNA, 25 bp, Homo sapiens
tgtttccagcatgaggtatctaagg

SEQ ID NO: 2941 - DNA, 25 bp, Homo sapiens
ttactctcttccacatgttactgga

SEQ ID NO: 2942 - DNA, 25 bp, Homo sapiens
ttcagtcaaaactttaaacctgtag

SEQ ID NO: 2943 - DNA, 25 bp, Homo sapiens
aaaggtgcctggtccaatgtgctga

SEQ ID NO: 2944 - DNA, 25 bp, Homo sapiens
atgtacacggggacagttgactgct

SEQ ID NO: 2945 - DNA, 25 bp, Homo sapiens
catgggcggtgcttttgtattggtg

SEQ ID NO: 2946 - DNA, 25 bp, Homo sapiens
cccagagtgtgacggcagtcgcagg

SEQ ID NO: 2947 - DNA, 25 bp, Homo sapiens
cccctttgacactgttcgtcgtaga

SEQ ID NO: 2948 - DNA, 25 bp, Homo sapiens
gaaaggggccgatattatgtacacg

SEQ ID NO: 2949 - DNA, 25 bp, Homo sapiens
gagatgcttcattgagtgttcatta

SEQ ID NO: 2950 - DNA, 25 bp, Homo sapiens
gagccaaggccttcttcaaaggtgc

SEQ ID NO: 2951 - DNA, 25 bp, Homo sapiens
gatgcagtccggccggaaaggggcc

SEQ ID NO: 2952 - DNA, 25 bp, Homo sapiens
gtgagctggatgattgcccagagtg

SEQ ID NO: 2953 - DNA, 25 bp, Homo sapiens
gtgctgagaggcatgggcggtgctt

SEQ ID NO: 2954 - DNA, 25 bp, Homo sapiens
acatcaagcgcctccttaaagttgc

SEQ ID NO: 2955 - DNA, 25 bp, Homo sapiens
accgatcccaagctcatcatttgga

SEQ ID NO: 2956 - DNA, 25 bp, Homo sapiens
caagacttgggtaagctctgggcct

SEQ ID NO: 2957 - DNA, 25 bp, Homo sapiens
caccttcctaaaccctcatgggtgg

SEQ ID NO: 2958 - DNA, 25 bp, Homo sapiens
cctactccatccagtcctgaggagc

SEQ ID NO: 2959 - DNA, 25 bp, Homo sapiens
ccttcccaaccatcaacattgagcc

SEQ ID NO: 2960 - DNA, 25 bp, Homo sapiens
ctacccttatgatgacccattttcc

SEQ ID NO: 2961 - DNA, 25 bp, Homo sapiens
ctctcccaaccctctggttggtgat

SEQ ID NO: 2962 - DNA, 25 bp, Homo sapiens
gaactgctcaacacacagatctcct

SEQ ID NO: 2963 - DNA, 25 bp, Homo sapiens
gatgcagcatgccttcaggagacac

SEQ ID NO: 2964 - DNA, 25 bp, Homo sapiens
gttggtgattcaacttgggctccaa

SEQ ID NO: 2965 - DNA, 25 bp, Homo sapiens
aaagaggactgaaggctatgcagcc

SEQ ID NO: 2966 - DNA, 25 bp, Homo sapiens
agagatcagccctactaagtttcct

SEQ ID NO: 2967 - DNA, 25 bp, Homo sapiens
atccatgttttcaagaagcccagct

SEQ ID NO: 2968 - DNA, 25 bp, Homo sapiens
atgagcctcctgatgtagtgtctga

SEQ ID NO: 2969 - DNA, 25 bp, Homo sapiens
ccccagctctgaagagatcagccct

SEQ ID NO: 2970 - DNA, 25 bp, Homo sapiens
gagatgaggcagaaagtccttctaa

SEQ ID NO: 2971 - DNA, 25 bp, Homo sapiens
gcagcctttcaggaagatagctctg

SEQ ID NO: 2972 - DNA, 25 bp, Homo sapiens
ggcatcagcatgactgagtgcttcc

SEQ ID NO: 2973 - DNA, 25 bp, Homo sapiens
gtaacagagaagacctcgtcccttc

SEQ ID NO: 2974 - DNA, 25 bp, Homo sapiens
taagtttcctggattgtaccgcact

SEQ ID NO: 2975 - DNA, 25 bp, Homo sapiens
tgacagcagctgatgttgttaaaca

SEQ ID NO: 2976 - DNA, 25 bp, Homo sapiens
actataacaatcactggctaccgaa

SEQ ID NO: 2977 - DNA, 25 bp, Homo sapiens
atgagccataggaaggcactacatg

SEQ ID NO: 2978 - DNA, 25 bp, Homo sapiens
cattcaatttttaccacttctgttt

SEQ ID NO: 2979 - DNA, 25 bp, Homo sapiens
gaaaggggcattttgtactcttgtt

SEQ ID NO: 2980 - DNA, 25 bp, Homo sapiens
gaagcccattcattagaagtgtggt

SEQ ID NO: 2981 - DNA, 25 bp, Homo sapiens
gatgtcaaacgatcctaagcgaaga

SEQ ID NO: 2982 - DNA, 25 bp, Homo sapiens
gcaatgctatcactgtctttgactg

SEQ ID NO: 2983 - DNA, 25 bp, Homo sapiens
gcgaacttgtatacttattttctgt

SEQ ID NO: 2984 - DNA, 25 bp, Homo sapiens
gtctttgactgtgattttatgttta

SEQ ID NO: 2985 - DNA, 25 bp, Homo sapiens
taccacttctgtttagcgaacttgt

SEQ ID NO: 2986 - DNA, 25 bp, Homo sapiens
tatgtttccgaggcactgttttatc

SEQ ID NO: 2987 - DNA, 25 bp, Homo sapiens
aaggctcctatgacttctagaagta

SEQ ID NO: 2988 - DNA, 25 bp, Homo sapiens
aatggagaagagcttcaggaaacct

SEQ ID NO: 2989 - DNA, 25 bp, Homo sapiens
acctgcagctcatccctaagaagag

SEQ ID NO: 2990 - DNA, 25 bp, Homo sapiens
agcaggaagagacgtttcagcagta

SEQ ID NO: 2991 - DNA, 25 bp, Homo sapiens
agtgacttttcagacctgagtaatg

SEQ ID NO: 2992 - DNA, 25 bp, Homo sapiens
gagacgtttcagcagtagtgacttt

SEQ ID NO: 2993 - DNA, 25 bp, Homo sapiens
gcaagcatggtgagaaggctcctat

SEQ ID NO: 2994 - DNA, 25 bp, Homo sapiens
gcagctcatccctaagaagagggtc

SEQ ID NO: 2995 - DNA, 25 bp, Homo sapiens
gcatggtgagaaggctcctatgact

SEQ ID NO: 2996 - DNA, 25 bp, Homo sapiens
gcggggcactgagaagcaagcatgg

SEQ ID NO: 2997 - DNA, 25 bp, Homo sapiens
gctcatccctaagaagagggtcagg

SEQ ID NO: 2998 - DNA, 25 bp, Homo sapiens
atagcttttgcagaggagtggtggg

SEQ ID NO: 2999 - DNA, 25 bp, Homo sapiens
atctatgtatagtttttctcctttt

SEQ ID NO: 3000 - DNA, 25 bp, Homo sapiens
cctttagggttggcgagcatctctg

SEQ ID NO: 3001 - DNA, 25 bp, Homo sapiens
cgccactttgtgtagatcctacctg

SEQ ID NO: 3002 - DNA, 25 bp, Homo sapiens
gacagagaggcacctgggtcagtat

SEQ ID NO: 3003 - DNA, 25 bp, Homo sapiens
gatcctacctggagggaatggcttt

SEQ ID NO: 3004 - DNA, 25 bp, Homo sapiens
ggtccaggctggaaacctgaacttt

SEQ ID NO: 3005 - DNA, 25 bp, Homo sapiens
gtttttgccttgtaaactagcgcca

SEQ ID NO: 3006 - DNA, 25 bp, Homo sapiens
taaactagcgccaaggaactgcagc

SEQ ID NO: 3007 - DNA, 25 bp, Homo sapiens
tgccagagcttgtgagggtgacaga

SEQ ID NO: 3008 - DNA, 25 bp, Homo sapiens
tgccgaggtctgggcgtgtttgggc

SEQ ID NO: 3009 - DNA, 25 bp, Homo sapiens
agccttgaactctatcatcgacgtc

SEQ ID NO: 3010 - DNA, 25 bp, Homo sapiens
atcatcgacgtctaccacaagtact

SEQ ID NO: 3011 - DNA, 25 bp, Homo sapiens
caggaaaaagggtgcagacgtctgg

SEQ ID NO: 3012 - DNA, 25 bp, Homo sapiens
gaaagccttgaactctatcatcgac

SEQ ID NO: 3013 - DNA, 25 bp, Homo sapiens
gaatttccatgccgtctacagggat

SEQ ID NO: 3014 - DNA, 25 bp, Homo sapiens
ggagaaagccttgaactctatcatc

SEQ ID NO: 3015 - DNA, 25 bp, Homo sapiens
ggcatcatgttgaccgagctggaga

SEQ ID NO: 3016 - DNA, 25 bp, Homo sapiens
gttgaccgagctggagaaagccttg

SEQ ID NO: 3017 - DNA, 25 bp, Homo sapiens
tctatcatcgacgtctaccacaagt

SEQ ID NO: 3018 - DNA, 25 bp, Homo sapiens
tgaactctatcatcgacgtctacca

SEQ ID NO: 3019 - DNA, 25 bp, Homo sapiens
tttccatgccgtctacagggatgac

SEQ ID NO: 3020 - DNA, 25 bp, Homo sapiens
aaaggtgaacactcatgcggcagcc

SEQ ID NO: 3021 - DNA, 25 bp, Homo sapiens
aaggaattgacttcagcaggggtgg

SEQ ID NO: 3022 - DNA, 25 bp, Homo sapiens
agccatttgaagacgcctcgtttgc

SEQ ID NO: 3023 - DNA, 25 bp, Homo sapiens
atttgaagacgcctcgtttgcgctg

SEQ ID NO: 3024 - DNA, 25 bp, Homo sapiens
cagactcgagggccgaattgtttct

SEQ ID NO: 3025 - DNA, 25 bp, Homo sapiens
ccgccagattctcccttaaggaatt

SEQ ID NO: 3026 - DNA, 25 bp, Homo sapiens
gattctcccttaaggaattgacttc

SEQ ID NO: 3027 - DNA, 25 bp, Homo sapiens
ggaggcagactcgagggccgaattg

SEQ ID NO: 3028 - DNA, 25 bp, Homo sapiens
ggtgctggaggcagactcgagggcc

SEQ ID NO: 3029 - DNA, 25 bp, Homo sapiens
tattgttcccacaatggctgggagg

SEQ ID NO: 3030 - DNA, 25 bp, Homo sapiens
tcagtcgcaaaggtgaacactcatg

SEQ ID NO: 3031 - DNA, 25 bp, Homo sapiens
cacagacatccctaaaagtgccccc

SEQ ID NO: 3032 - DNA, 25 bp, Homo sapiens
cctgatggctctgtgcagtacctgg

SEQ ID NO: 3033 - DNA, 25 bp, Homo sapiens
ctcacctacagctgggatgtacctg

SEQ ID NO: 3034 - DNA, 25 bp, Homo sapiens
ctcggagagtacggcctgatggctc

SEQ ID NO: 3035 - DNA, 25 bp, Homo sapiens
gctctgtgcagtacctggttgagtg

SEQ ID NO: 3036 - DNA, 25 bp, Homo sapiens
ggctggaatccaagagtggggagtg

SEQ ID NO: 3037 - DNA, 25 bp, Homo sapiens
gggactgggggaggagtccgaggtg

SEQ ID NO: 3038 - DNA, 25 bp, Homo sapiens
gtacctggttgagtggggaggaggg

SEQ ID NO: 3039 - DNA, 25 bp, Homo sapiens
tagtttgtctcctgggactggggga

SEQ ID NO: 3040 - DNA, 25 bp, Homo sapiens
tccgggtccttgctcggagagtacg

SEQ ID NO: 3041 - DNA, 25 bp, Homo sapiens
tccttgctcggagagtacggcctga

SEQ ID NO: 3042 - DNA, 25 bp, Homo sapiens
aaatgctcttatttttccaacagct

SEQ ID NO: 3043 - DNA, 25 bp, Homo sapiens
acatgacctatccaagcgcattacc

SEQ ID NO: 3044 - DNA, 25 bp, Homo sapiens
agttgaacagtgtgccctagctttt

SEQ ID NO: 3045 - DNA, 25 bp, Homo sapiens
atcagtggccaggccaaccttggct

SEQ ID NO: 3046 - DNA, 25 bp, Homo sapiens
cctagcttttcttgcaaccagagta

SEQ ID NO: 3047 - DNA, 25 bp, Homo sapiens
gaattccctttggacatttgtgttt

SEQ ID NO: 3048 - DNA, 25 bp, Homo sapiens
gagaggaccaaccagaattcccttt

SEQ ID NO: 3049 - DNA, 25 bp, Homo sapiens
gcaactcgtacccaaatttccaaga

SEQ ID NO: 3050 - DNA, 25 bp, Homo sapiens
gccaaccttggctaaatggagcagc

SEQ ID NO: 3051 - DNA, 25 bp, Homo sapiens
ggagaatcgtgtgatcagtgtgcta

SEQ ID NO: 3052 - DNA, 25 bp, Homo sapiens
ttttccaacagctaaactactctta

SEQ ID NO: 3053 - DNA, 25 bp, Homo sapiens
aaggttctctagtctctgattagcc

SEQ ID NO: 3054 - DNA, 25 bp, Homo sapiens
atgaccccatatgttctgtgagaat

SEQ ID NO: 3055 - DNA, 25 bp, Homo sapiens
attggttggctgccaatgaccccat

SEQ ID NO: 3056 - DNA, 25 bp, Homo sapiens
gaatagtagctttatctttgatata

SEQ ID NO: 3057 - DNA, 25 bp, Homo sapiens
gactgctcagtttccaagggttttc

SEQ ID NO: 3058 - DNA, 25 bp, Homo sapiens
gattagccatgactgtattggactt

SEQ ID NO: 3059 - DNA, 25 bp, Homo sapiens
ggcatgagtgtgcattccagtaatt

SEQ ID NO: 3060 - DNA, 25 bp, Homo sapiens
taacatgttagttgtcatttggcat

SEQ ID NO: 3061 - DNA, 25 bp, Homo sapiens
tctgtttttctggtgagggtcaaat

SEQ ID NO: 3062 - DNA, 25 bp, Homo sapiens
ttcaagcctacttacctttataaag

SEQ ID NO: 3063 - DNA, 25 bp, Homo sapiens
tttacttcattattggttggctgcc

SEQ ID NO: 3064 - DNA, 25 bp, Homo sapiens
atatttcaacgcttctgcaatgatg

SEQ ID NO: 3065 - DNA, 25 bp, Homo sapiens
attcatccagacatattacagccag

SEQ ID NO: 3066 - DNA, 25 bp, Homo sapiens
catattacagccagtttggggcccc

SEQ ID NO: 3067 - DNA, 25 bp, Homo sapiens
ccccaccttcaacaatatttcaacg

SEQ ID NO: 3068 - DNA, 25 bp, Homo sapiens
cttcactacactgccttacataaac

SEQ ID NO: 3069 - DNA, 25 bp, Homo sapiens
gcaagcattcatttttagctcgctc

SEQ ID NO: 3070 - DNA, 25 bp, Homo sapiens
ggacttgagactttggtcccagccc

SEQ ID NO: 3071 - DNA, 25 bp, Homo sapiens
gttttccagtctgtttaacttctgc

SEQ ID NO: 3072 - DNA, 25 bp, Homo sapiens
tagctcgctcattttttaccatgtt

SEQ ID NO: 3073 - DNA, 25 bp, Homo sapiens
tcaaggcccagtataaatgccacct

SEQ ID NO: 3074 - DNA, 25 bp, Homo sapiens
ttaacttctgcagtgccttcactac

SEQ ID NO: 3075 - DNA, 25 bp, Homo sapiens
acccctggtgcgactgagaggcggt

SEQ ID NO: 3076 - DNA, 25 bp, Homo sapiens
accgtctgcgacgacaagtgggacc

SEQ ID NO: 3077 - DNA, 25 bp, Homo sapiens
catccacctcaacgagatccagtgc

SEQ ID NO: 3078 - DNA, 25 bp, Homo sapiens
ctacatcggggagggccgcgtggag

SEQ ID NO: 3079 - DNA, 25 bp, Homo sapiens
gccgtggtgagttgtgtgcctgggc

SEQ ID NO: 3080 - DNA, 25 bp, Homo sapiens
ggaccccatgaagaatgtcacctgc

SEQ ID NO: 3081 - DNA, 25 bp, Homo sapiens
gttcaatgccgagtctcagggctgc

SEQ ID NO: 3082 - DNA, 25 bp, Homo sapiens
tctcagggctgcaaccacgaggagg

SEQ ID NO: 3083 - DNA, 25 bp, Homo sapiens
tgagaggcggtgcctacatcgggga

SEQ ID NO: 3084 - DNA, 25 bp, Homo sapiens
tgcctcacggaggaagcagcgctac

SEQ ID NO: 3085 - DNA, 25 bp, Homo sapiens
tggggcaagggatcggacccatcca

SEQ ID NO: 3086 - DNA, 25 bp, Homo sapiens
aagggggctaggcagggcatttgtg

SEQ ID NO: 3087 - DNA, 25 bp, Homo sapiens
aagtacctatcgcagttttgaagtc

SEQ ID NO: 3088 - DNA, 25 bp, Homo sapiens
aggcaatcctgcctactaacaacac

SEQ ID NO: 3089 - DNA, 25 bp, Homo sapiens
caaaaacactgcggactttcactca

SEQ ID NO: 3090 - DNA, 25 bp, Homo sapiens
caagcagccgtgaaatcgctcttca

SEQ ID NO: 3091 - DNA, 25 bp, Homo sapiens
gacagacctgagaccaatctgggta

SEQ ID NO: 3092 - DNA, 25 bp, Homo sapiens
gactttcactcaagctggtctttct

SEQ ID NO: 3093 - DNA, 25 bp, Homo sapiens
gtgtcaggtggcttatttgtggatg

SEQ ID NO: 3094 - DNA, 25 bp, Homo sapiens
taaagtgggcttaattctctagttt

SEQ ID NO: 3095 - DNA, 25 bp, Homo sapiens
taagaatcaccagatacccaccata

SEQ ID NO: 3096 - DNA, 25 bp, Homo sapiens
ttcttccccagtgtaaggcaatcct

SEQ ID NO: 3097 - DNA, 25 bp, Homo sapiens
aaggaactccaggttgaactgtctg

SEQ ID NO: 3098 - DNA, 25 bp, Homo sapiens
acctcgcaacatcaacatctatact

SEQ ID NO: 3099 - DNA, 25 bp, Homo sapiens
caaatcaacaaacgtgcctctggcc

SEQ ID NO: 3100 - DNA, 25 bp, Homo sapiens
ccgtgaggctaatctagctgctatt

SEQ ID NO: 3101 - DNA, 25 bp, Homo sapiens
ctagctgctattattgaacgtctgc

SEQ ID NO: 3102 - DNA, 25 bp, Homo sapiens
gaagcaagggagggtctggcacgcc

SEQ ID NO: 3103 - DNA, 25 bp, Homo sapiens
gaagccccacgaactttagcttctc

SEQ ID NO: 3104 - DNA, 25 bp, Homo sapiens
gagaggcatgctgcggaggtgcgca

SEQ ID NO: 3105 - DNA, 25 bp, Homo sapiens
ggaacacgagcgagaagtccttcag

SEQ ID NO: 3106 - DNA, 25 bp, Homo sapiens
ggttgaactgtctggctgaagcaag

SEQ ID NO: 3107 - DNA, 25 bp, Homo sapiens
tgagctgatcttgaagccaccatct

SEQ ID NO: 3108 - DNA, 25 bp, Homo sapiens
aatctgcccagtgccttagatacaa

SEQ ID NO: 3109 - DNA, 25 bp, Homo sapiens
acccccccaatttctgtgagatgga

SEQ ID NO: 3110 - DNA, 25 bp, Homo sapiens
gatggatggccagtgcaagcgtgac

SEQ ID NO: 3111 - DNA, 25 bp, Homo sapiens
gcaggctttcaagaagtgccagttg

SEQ ID NO: 3112 - DNA, 25 bp, Homo sapiens
ggaagtgcccagtgacttatggcca

SEQ ID NO: 3113 - DNA, 25 bp, Homo sapiens
gtccttcaaagctggagtctgtcct

SEQ ID NO: 3114 - DNA, 25 bp, Homo sapiens
gtgaaagcttgattcctgccatatg

SEQ ID NO: 3115 - DNA, 25 bp, Homo sapiens
gttgtcctgacacttgtggcatcaa

SEQ ID NO: 3116 - DNA, 25 bp, Homo sapiens
tcctgccttcaccatgaagtccagc

SEQ ID NO: 3117 - DNA, 25 bp, Homo sapiens
tctgtcctcctaagaaatctgccca

SEQ ID NO: 3118 - DNA, 25 bp, Homo sapiens
tgtgggaaatcctgcgtttcccctg

SEQ ID NO: 3119 - DNA, 25 bp, Homo sapiens
acacggcctactgagcggacagaat

SEQ ID NO: 3120 - DNA, 25 bp, Homo sapiens
cagcattcctccatcttagatagat

SEQ ID NO: 3121 - DNA, 25 bp, Homo sapiens
gaagcatatgcctacttgtaatttc

SEQ ID NO: 3122 - DNA, 25 bp, Homo sapiens
gagaaacctccggtgtgagatatac

SEQ ID NO: 3123 - DNA, 25 bp, Homo sapiens
gccaaaatattgcttatgtctctac

SEQ ID NO: 3124 - DNA, 25 bp, Homo sapiens
ggatgatcacatggaaggcggcgca

SEQ ID NO: 3125 - DNA, 25 bp, Homo sapiens
ggccctaccagagggaacacggcct

SEQ ID NO: 3126 - DNA, 25 bp, Homo sapiens
tagatggtactctccaaaggcccta

SEQ ID NO: 3127 - DNA, 25 bp, Homo sapiens
tgaaccacgtgttttgacatcatgt

SEQ ID NO: 3128 - DNA, 25 bp, Homo sapiens
tggaaggcggcgcagaggcagctgt

SEQ ID NO: 3129 - DNA, 25 bp, Homo sapiens
tttgagtatccgattcgccatcacc

SEQ ID NO: 3130 - DNA, 25 bp, Homo sapiens
aaattaagtttgcagccatcggccc

SEQ ID NO: 3131 - DNA, 25 bp, Homo sapiens
cctcacatacagtctcaagcacatt

SEQ ID NO: 3132 - DNA, 25 bp, Homo sapiens
ccttcctgtaagctgcactgcagag

SEQ ID NO: 3133 - DNA, 25 bp, Homo sapiens
ctggccactggcatcaggaaggctc

SEQ ID NO: 3134 - DNA, 25 bp, Homo sapiens
gaacctgaacagctactattcccag

SEQ ID NO: 3135 - DNA, 25 bp, Homo sapiens
gatggagccaggcatcggcaagggc

SEQ ID NO: 3136 - DNA, 25 bp, Homo sapiens
gcacctgaggaccggggatcgggac

SEQ ID NO: 3137 - DNA, 25 bp, Homo sapiens
gcctcaagcctgagtggaagcacct

SEQ ID NO: 3138 - DNA, 25 bp, Homo sapiens
taaaccctagccctgtgagagcttc

SEQ ID NO: 3139 - DNA, 25 bp, Homo sapiens
tggaagccagcttaaaccctagccc

SEQ ID NO: 3140 - DNA, 25 bp, Homo sapiens
tgtatcagacagttgcacacccagg

SEQ ID NO: 3141 - DNA, 25 bp, Homo sapiens
aaaattctctcgccatcttaataac

SEQ ID NO: 3142 - DNA, 25 bp, Homo sapiens
aatccatcccaaccgagatgccatt

SEQ ID NO: 3143 - DNA, 25 bp, Homo sapiens
caaaacacttctctatcatgcagcc

SEQ ID NO: 3144 - DNA, 25 bp, Homo sapiens
cagaagggtgtgaccatgccctcag

SEQ ID NO: 3145 - DNA, 25 bp, Homo sapiens
ccaagctggtcacagagtctcctgg

SEQ ID NO: 3146 - DNA, 25 bp, Homo sapiens
ctggctgggagcccttttgttttag

SEQ ID NO: 3147 - DNA, 25 bp, Homo sapiens
gagactgggtacctggagattctga

SEQ ID NO: 3148 - DNA, 25 bp, Homo sapiens
gattctgaagtgcctttgctgtggt

SEQ ID NO: 3149 - DNA, 25 bp, Homo sapiens
gtccccactgaacggcaactgagac

SEQ ID NO: 3150 - DNA, 25 bp, Homo sapiens
tggggacttgtggatcattccttcc

SEQ ID NO: 3151 - DNA, 25 bp, Homo sapiens
tgttataagaggcgtgggctcccct

SEQ ID NO: 3152 - DNA, 25 bp, Homo sapiens
aaattcctggggctgatacttctct

SEQ ID NO: 3153 - DNA, 25 bp, Homo sapiens
atcaccctaaatttactcatctctc

SEQ ID NO: 3154 - DNA, 25 bp, Homo sapiens
caattccgagatctaatctccccct

SEQ ID NO: 3155 - DNA, 25 bp, Homo sapiens
cccactggcctgaatctacactgga

SEQ ID NO: 3156 - DNA, 25 bp, Homo sapiens
ctacgctctgccaggaattctttca

SEQ ID NO: 3157 - DNA, 25 bp, Homo sapiens
ctttcagacctcactagcacaagcc

SEQ ID NO: 3158 - DNA, 25 bp, Homo sapiens
gatcattctcacttcaaattcctgg

SEQ ID NO: 3159 - DNA, 25 bp, Homo sapiens
gtaagtgggcatggtctcctaatgg

SEQ ID NO: 3160 - DNA, 25 bp, Homo sapiens
taccgcatttacggctgcattctgt

SEQ ID NO: 3161 - DNA, 25 bp, Homo sapiens
tccccaaacttgctgtcaattccga

SEQ ID NO: 3162 - DNA, 25 bp, Homo sapiens
tgcaccccaacctctgtaaatagat

SEQ ID NO: 3163 - DNA, 25 bp, Homo sapiens
aatgccatttaatgccattgtcacc

SEQ ID NO: 3164 - DNA, 25 bp, Homo sapiens
agttgaatgccttctttctgaacat

SEQ ID NO: 3165 - DNA, 25 bp, Homo sapiens
atgatacgtgccttggtgggagtcc

SEQ ID NO: 3166 - DNA, 25 bp, Homo sapiens
atgccattgtcaccttggatttatg

SEQ ID NO: 3167 - DNA, 25 bp, Homo sapiens
ccagcatcttctctatcttagttga

SEQ ID NO: 3168 - DNA, 25 bp, Homo sapiens
gaggccaccattcattggtcatctt

SEQ ID NO: 3169 - DNA, 25 bp, Homo sapiens
gattccccatacacccaagggtaat

SEQ ID NO: 3170 - DNA, 25 bp, Homo sapiens
ggagtccgtggtgccacagggaagg

SEQ ID NO: 3171 - DNA, 25 bp, Homo sapiens
tacagtgttcatgatacgtgccttg

SEQ ID NO: 3172 - DNA, 25 bp, Homo sapiens
tagtgatgagcttcaccctggagct

SEQ ID NO: 3173 - DNA, 25 bp, Homo sapiens
ttcagaggtgctcttagattcccca

SEQ ID NO: 3174 - DNA, 25 bp, Homo sapiens
aaactggtgccgagggagctgttct

SEQ ID NO: 3175 - DNA, 25 bp, Homo sapiens
aagaccaacttggctgttcatgaag

SEQ ID NO: 3176 - DNA, 25 bp, Homo sapiens
cacatgtgccataccgggacagcaa

SEQ ID NO: 3177 - DNA, 25 bp, Homo sapiens
gaacacagctctagaagtcacagta

SEQ ID NO: 3178 - DNA, 25 bp, Homo sapiens
gattcttcaggactctttgggtggg

SEQ ID NO: 3179 - DNA, 25 bp, Homo sapiens
gcaaaccgacacgtggctgtgacaa

SEQ ID NO: 3180 - DNA, 25 bp, Homo sapiens
gttctccttctgtcttcaatgaggc

SEQ ID NO: 3181 - DNA, 25 bp, Homo sapiens
gtttgtgtcgagccctgaggaagtc

SEQ ID NO: 3182 - DNA, 25 bp, Homo sapiens
taaaggggtgcactgagcggtttgt

SEQ ID NO: 3183 - DNA, 25 bp, Homo sapiens
tgaggctgagaccaagtccacactg

SEQ ID NO: 3184 - DNA, 25 bp, Homo sapiens
tgcagaaccaccatcgtcatttgct

SEQ ID NO: 3185 - DNA, 25 bp, Homo sapiens
aaaagatctggaagtcaccctcctc

SEQ ID NO: 3186 - DNA, 25 bp, Homo sapiens
aacgatgctgtactatagtccatgt

SEQ ID NO: 3187 - DNA, 25 bp, Homo sapiens
aagatttcacttcattgtctagccc

SEQ ID NO: 3188 - DNA, 25 bp, Homo sapiens
aagtgtgtcctgtgtactgcagatg

SEQ ID NO: 3189 - DNA, 25 bp, Homo sapiens
actgcagatgtgtgttctctgggct

SEQ ID NO: 3190 - DNA, 25 bp, Homo sapiens
atgtatgggtactctggcagactgc

SEQ ID NO: 3191 - DNA, 25 bp, Homo sapiens
ccgctccatgaagtctgcttactta

SEQ ID NO: 3192 - DNA, 25 bp, Homo sapiens
ctcctctggcccacggaaaattttg

SEQ ID NO: 3193 - DNA, 25 bp, Homo sapiens
ggataactgccgaagtaagcgccgc

SEQ ID NO: 3194 - DNA, 25 bp, Homo sapiens
gtatctgtacagtagctttcacatt

SEQ ID NO: 3195 - DNA, 25 bp, Homo sapiens
ttctctgggctttatgtatctgtac

SEQ ID NO: 3196 - DNA, 25 bp, Homo sapiens
aactaacttgatagggtctaccaat

SEQ ID NO: 3197 - DNA, 25 bp, Homo sapiens
agaaaatttgccaatctttcctact

SEQ ID NO: 3198 - DNA, 25 bp, Homo sapiens
ataatccccacaggcacattaactg

SEQ ID NO: 3199 - DNA, 25 bp, Homo sapiens
atgtccttaaaatgtggtctgccaa

SEQ ID NO: 3200 - DNA, 25 bp, Homo sapiens
atttatgacaagctgtatcactgcc

SEQ ID NO: 3201 - DNA, 25 bp, Homo sapiens
gaaagatacttacatgttcccaaaa

SEQ ID NO: 3202 - DNA, 25 bp, Homo sapiens
gatgacaatcaaagccggcctgaga

SEQ ID NO: 3203 - DNA, 25 bp, Homo sapiens
gccggcctgagaaacactatttgtg

SEQ ID NO: 3204 - DNA, 25 bp, Homo sapiens
gtggtctgccaatctgtacaaaatg

SEQ ID NO: 3205 - DNA, 25 bp, Homo sapiens
taactgttgcacttttgaatgtcca

SEQ ID NO: 3206 - DNA, 25 bp, Homo sapiens
tattacgaatgcccctgttcatgtt

SEQ ID NO: 3207 - DNA, 25 bp, Homo sapiens
aaacttgactccatttcatcattgt

SEQ ID NO: 3208 - DNA, 25 bp, Homo sapiens
aaattgctatgttactattttctac

SEQ ID NO: 3209 - DNA, 25 bp, Homo sapiens
aatgcttcagatattattgctttat

SEQ ID NO: 3210 - DNA, 25 bp, Homo sapiens
agtgccagaattttaggaacttcag

SEQ ID NO: 3211 - DNA, 25 bp, Homo sapiens
ggaacttcagagatcgtgtattgag

SEQ ID NO: 3212 - DNA, 25 bp, Homo sapiens
ggtagcttcagctagcttttaggaa

SEQ ID NO: 3213 - DNA, 25 bp, Homo sapiens
gtcaagggcttactatttctgggtc

SEQ ID NO: 3214 - DNA, 25 bp, Homo sapiens
tagaaaaagaggcgcttctcccctc

SEQ ID NO: 3215 - DNA, 25 bp, Homo sapiens
tcagttagtttttaggtcaagggct

SEQ ID NO: 3216 - DNA, 25 bp, Homo sapiens
tcatcattgtttctgcatgaatatc

SEQ ID NO: 3217 - DNA, 25 bp, Homo sapiens
ttgtgctcatttaagtttcaaactt

SEQ ID NO: 3218 - DNA, 25 bp, Homo sapiens
aaaatgagcccaccttgtgttcttc

SEQ ID NO: 3219 - DNA, 25 bp, Homo sapiens
cacctccaactctaacaataaacca

SEQ ID NO: 3220 - DNA, 25 bp, Homo sapiens
ccaacatttgacaccccagcaatgt

SEQ ID NO: 3221 - DNA, 25 bp, Homo sapiens
ccttctctgccaaacgactgggaaa

SEQ ID NO: 3222 - DNA, 25 bp, Homo sapiens
ctgccagactactgccagactgaga

SEQ ID NO: 3223 - DNA, 25 bp, Homo sapiens
gaaacccagaagctggtagtcatgt

SEQ ID NO: 3224 - DNA, 25 bp, Homo sapiens
gccacagcttaactcctacagagtg

SEQ ID NO: 3225 - DNA, 25 bp, Homo sapiens
ggaaaccaaaatgagcccaccttgt

SEQ ID NO: 3226 - DNA, 25 bp, Homo sapiens
gttcccagctgctgtaacggagcca

SEQ ID NO: 3227 - DNA, 25 bp, Homo sapiens
tctccaaacccgctcttggacagag

SEQ ID NO: 3228 - DNA, 25 bp, Homo sapiens
tgctatagttcccagctgctgtaac

SEQ ID NO: 3229 - DNA, 25 bp, Homo sapiens
cagcccgctttgtgtgactaaaatg

SEQ ID NO: 3230 - DNA, 25 bp, Homo sapiens
gaagctgttcccatgcttgagcttc

SEQ ID NO: 3231 - DNA, 25 bp, Homo sapiens
gatggcacctcctttggtgaaacca

SEQ ID NO: 3232 - DNA, 25 bp, Homo sapiens
gcacacaaatggacttctctgaagc

SEQ ID NO: 3233 - DNA, 25 bp, Homo sapiens
gctgcttctaaactttacatgcctg

SEQ ID NO: 3234 - DNA, 25 bp, Homo sapiens
tcattttcacttccagtctaagcca

SEQ ID NO: 3235 - DNA, 25 bp, Homo sapiens
tgcacaggagcagcattatccccaa

SEQ ID NO: 3236 - DNA, 25 bp, Homo sapiens
tgccctcccattacctagatggcac

SEQ ID NO: 3237 - DNA, 25 bp, Homo sapiens
tgctgagtgagcagtttcctacgcc

SEQ ID NO: 3238 - DNA, 25 bp, Homo sapiens
ttcctacgccgtggatctagcaagc

SEQ ID NO: 3239 - DNA, 25 bp, Homo sapiens
tttctatgagcacactctgctgctt

SEQ ID NO: 3240 - DNA, 25 bp, Homo sapiens
acaatctccctccataatgtgagca

SEQ ID NO: 3241 - DNA, 25 bp, Homo sapiens
atgattctagaacagcactccatgt

SEQ ID NO: 3242 - DNA, 25 bp, Homo sapiens
cactcccatggatgaagcactgcac

SEQ ID NO: 3243 - DNA, 25 bp, Homo sapiens
ccaagtccagtacacacctcaagga

SEQ ID NO: 3244 - DNA, 25 bp, Homo sapiens
gcactccatgtagctgctgcagagg

SEQ ID NO: 3245 - DNA, 25 bp, Homo sapiens
gcactgcactttggacaccatgatg

SEQ ID NO: 3246 - DNA, 25 bp, Homo sapiens
ggaacagcgggactatgattctaga

SEQ ID NO: 3247 - DNA, 25 bp, Homo sapiens
ggacaggtggaataacactcccatg

SEQ ID NO: 3248 - DNA, 25 bp, Homo sapiens
gtctgcacttcgaagatttgctttg

SEQ ID NO: 3249 - DNA, 25 bp, Homo sapiens
gtgagcaatattacctcgtgcattg

SEQ ID NO: 3250 - DNA, 25 bp, Homo sapiens
tggagttttcttcattgtgcacaca

SEQ ID NO: 3251 - DNA, 25 bp, Homo sapiens
cgacactgccctttagctgcagagc

SEQ ID NO: 3252 - DNA, 25 bp, Homo sapiens
gactgtgctattaactgctgccgtc

SEQ ID NO: 3253 - DNA, 25 bp, Homo sapiens
gattcttcctggggattacacagct

SEQ ID NO: 3254 - DNA, 25 bp, Homo sapiens
gtatcatatgtgctttttctgtatc

SEQ ID NO: 3255 - DNA, 25 bp, Homo sapiens
taaatgtgccgttatttacccctga

SEQ ID NO: 3256 - DNA, 25 bp, Homo sapiens
tatgactatgtgccgattcctgctt

SEQ ID NO: 3257 - DNA, 25 bp, Homo sapiens
tgctgccgtcagtaaactccaaaga

SEQ ID NO: 3258 - DNA, 25 bp, Homo sapiens
tggtaatatgctataccccactgct

SEQ ID NO: 3259 - DNA, 25 bp, Homo sapiens
ttgatgctgttgtctgtctggcagg

SEQ ID NO: 3260 - DNA, 25 bp, Homo sapiens
tttctgtatcctgagcgctctatat

SEQ ID NO: 3261 - DNA, 25 bp, Homo sapiens
tttttgctggtctcatctttggtaa

SEQ ID NO: 3262 - DNA, 25 bp, Homo sapiens
aagagaagtgacggctcctgtgcgt

SEQ ID NO: 3263 - DNA, 25 bp, Homo sapiens
accaggccaagttcttcgcctgcat

SEQ ID NO: 3264 - DNA, 25 bp, Homo sapiens
cccccaagcaggagtttctcgacat

SEQ ID NO: 3265 - DNA, 25 bp, Homo sapiens
cccctcctcggcagtgtgtggggtc

SEQ ID NO: 3266 - DNA, 25 bp, Homo sapiens
cgaggacccataagcaggcctccaa

SEQ ID NO: 3267 - DNA, 25 bp, Homo sapiens
ctgcgagtgcaagatcacgcgctgc

SEQ ID NO: 3268 - DNA, 25 bp, Homo sapiens
gaaccacaggtaccagatgggctgc

SEQ ID NO: 3269 - DNA, 25 bp, Homo sapiens
gggtctcgctggacgttggaggaaa

SEQ ID NO: 3270 - DNA, 25 bp, Homo sapiens
gtttcgactggtccagctctgacat

SEQ ID NO: 3271 - DNA, 25 bp, Homo sapiens
tatagagtttatctacacggccccc

SEQ ID NO: 3272 - DNA, 25 bp, Homo sapiens
tgagcaccacccagaagaagagcct

SEQ ID NO: 3273 - DNA, 25 bp, Homo sapiens
aggatcagaggctggggccaactgg

SEQ ID NO: 3274 - DNA, 25 bp, Homo sapiens
atgacaacctctttgagacgtcctt

SEQ ID NO: 3275 - DNA, 25 bp, Homo sapiens
cagggagacagcaaccatcgcctga

SEQ ID NO: 3276 - DNA, 25 bp, Homo sapiens
cttgctcaggctcagagggacctca

SEQ ID NO: 3277 - DNA, 25 bp, Homo sapiens
gactaagggcacttcctgaggttca

SEQ ID NO: 3278 - DNA, 25 bp, Homo sapiens
gcagaaagggccttgaatcctggcc

SEQ ID NO: 3279 - DNA, 25 bp, Homo sapiens
gctactcaggaaggaacgtctggtc

SEQ ID NO: 3280 - DNA, 25 bp, Homo sapiens
gctgagcgtgatgatctagcctcca

SEQ ID NO: 3281 - DNA, 25 bp, Homo sapiens
ggttggctacgaaatgcttgctcag

SEQ ID NO: 3282 - DNA, 25 bp, Homo sapiens
tctgccactgtccggaaattcatgg

SEQ ID NO: 3283 - DNA, 25 bp, Homo sapiens
tgaggttcattaccacctggggcag

SEQ ID NO: 3284 - DNA, 25 bp, Homo sapiens
atgagggcccgtaacagaaccagtg

SEQ ID NO: 3285 - DNA, 25 bp, Homo sapiens
cgatcctagctgcagatcgcatccc

SEQ ID NO: 3286 - DNA, 25 bp, Homo sapiens
gaggtggtatatttaaacttctgta

SEQ ID NO: 3287 - DNA, 25 bp, Homo sapiens
gcctatcacccttgtcagagatata

SEQ ID NO: 3288 - DNA, 25 bp, Homo sapiens
ggatttggcttcatacactgaattt

SEQ ID NO: 3289 - DNA, 25 bp, Homo sapiens
gtgatacgttagagggttcctattc

SEQ ID NO: 3290 - DNA, 25 bp, Homo sapiens
gttcctattcttccattgtacgata

SEQ ID NO: 3291 - DNA, 25 bp, Homo sapiens
taaaatgggcctatcacccttgtca

SEQ ID NO: 3292 - DNA, 25 bp, Homo sapiens
tactaactagtactttcctaattgg

SEQ ID NO: 3293 - DNA, 25 bp, Homo sapiens
taggcctgggaattccgatcctagc

SEQ ID NO: 3294 - DNA, 25 bp, Homo sapiens
ttcccttcatcagctaacacttatc

SEQ ID NO: 3295 - DNA, 25 bp, Homo sapiens
aacacctgtttccaaaccttgacag

SEQ ID NO: 3296 - DNA, 25 bp, Homo sapiens
aatgaacttgtttcctggttttgca

SEQ ID NO: 3297 - DNA, 25 bp, Homo sapiens
aatggagcaccaaggccaagcggac

SEQ ID NO: 3298 - DNA, 25 bp, Homo sapiens
agcggacagaggggccatgggttgt

SEQ ID NO: 3299 - DNA, 25 bp, Homo sapiens
agtgtgagattacctttctgttcct

SEQ ID NO: 3300 - DNA, 25 bp, Homo sapiens
atcacgccttgcccaagtgtgagat

SEQ ID NO: 3301 - DNA, 25 bp, Homo sapiens
cactttccgtcctttgtagagcagt

SEQ ID NO: 3302 - DNA, 25 bp, Homo sapiens
gaggaacggaatctgccgactcaca

SEQ ID NO: 3303 - DNA, 25 bp, Homo sapiens
gcagaaagtcacctgtctacataga

SEQ ID NO: 3304 - DNA, 25 bp, Homo sapiens
gcagtggtgtctccaatgaacttgt

SEQ ID NO: 3305 - DNA, 25 bp, Homo sapiens
gggtgatctggggatcacgccttgc

SEQ ID NO: 3306 - DNA, 25 bp, Homo sapiens
aatggtttgtgagtactggaaaaga

SEQ ID NO: 3307 - DNA, 25 bp, Homo sapiens
caaagagtcctcgtcagtgcttagc

SEQ ID NO: 3308 - DNA, 25 bp, Homo sapiens
catagtcactggctcgggggacaag

SEQ ID NO: 3309 - DNA, 25 bp, Homo sapiens
ccagacactagtgaggcaattccag

SEQ ID NO: 3310 - DNA, 25 bp, Homo sapiens
cccagatcttctccctggggtactg

SEQ ID NO: 3311 - DNA, 25 bp, Homo sapiens
ccctgaaatttgcttactgtggtaa

SEQ ID NO: 3312 - DNA, 25 bp, Homo sapiens
ctgcacaaccagacactagtgaggc

SEQ ID NO: 3313 - DNA, 25 bp, Homo sapiens
cttactgtggtaaatggtttgtgag

SEQ ID NO: 3314 - DNA, 25 bp, Homo sapiens
gataagtacatagtcactggctcgg

SEQ ID NO: 3315 - DNA, 25 bp, Homo sapiens
ggtgctgcacgtgaacaagcctgac

SEQ ID NO: 3316 - DNA, 25 bp, Homo sapiens
gtcctcgtcagtgcttagctgtgac

SEQ ID NO: 3317 - DNA, 25 bp, Homo sapiens
aatggagagcgcaggacttctcccc

SEQ ID NO: 3318 - DNA, 25 bp, Homo sapiens
acttctccccatgttatggctgatc

SEQ ID NO: 3319 - DNA, 25 bp, Homo sapiens
agaaggcaggggtccaggtgtggct

SEQ ID NO: 3320 - DNA, 25 bp, Homo sapiens
ccaggactacagaataccatcccct

SEQ ID NO: 3321 - DNA, 25 bp, Homo sapiens
cctctggaggttgcggtggctgaag

SEQ ID NO: 3322 - DNA, 25 bp, Homo sapiens
gaaggatgcatcatgtgctcctacc

SEQ ID NO: 3323 - DNA, 25 bp, Homo sapiens
gtagttgccgaagtccagatctgcc

SEQ ID NO: 3324 - DNA, 25 bp, Homo sapiens
gtccgtgagtcgtacacctgatggc

SEQ ID NO: 3325 - DNA, 25 bp, Homo sapiens
tctaccgcttttctgggtcacagag

SEQ ID NO: 3326 - DNA, 25 bp, Homo sapiens
tgaatggtctccgagtggatctccc

SEQ ID NO: 3327 - DNA, 25 bp, Homo sapiens
tgatcagtcatccaccaggaacgaa

SEQ ID NO: 3328 - DNA, 25 bp, Homo sapiens
attgggctggggaaacttgtcagaa

SEQ ID NO: 3329 - DNA, 25 bp, Homo sapiens
caattgccacccatcgggttttggg

SEQ ID NO: 3330 - DNA, 25 bp, Homo sapiens
ctgtaaggcagatgatcgtccccgt

SEQ ID NO: 3331 - DNA, 25 bp, Homo sapiens
gaaagccattagttgccattctctt

SEQ ID NO: 3332 - DNA, 25 bp, Homo sapiens
gaacggtttgtatttcattacagct

SEQ ID NO: 3333 - DNA, 25 bp, Homo sapiens
gatcgtccccgtatgatgattgtca

SEQ ID NO: 3334 - DNA, 25 bp, Homo sapiens
gggtgtgtgttttcatagcgtggtt

SEQ ID NO: 3335 - DNA, 25 bp, Homo sapiens
tacagctattcatcttttctacatt

SEQ ID NO: 3336 - DNA, 25 bp, Homo sapiens
tcctaatctatcacaattgccaccc

SEQ ID NO: 3337 - DNA, 25 bp, Homo sapiens
tctgaatctgttttgtcttcctaat

SEQ ID NO: 3338 - DNA, 25 bp, Homo sapiens
tgcagtattctctgctacttctgaa

SEQ ID NO: 3339 - DNA, 25 bp, Homo sapiens
aaatcgaggaggtgggacgggctgg

SEQ ID NO: 3340 - DNA, 25 bp, Homo sapiens
aagaaaatcctgagctttcctgtcc

SEQ ID NO: 3341 - DNA, 25 bp, Homo sapiens
acctgtggaactccctgattctata

SEQ ID NO: 3342 - DNA, 25 bp, Homo sapiens
atcaagtacctgtggaactccctga

SEQ ID NO: 3343 - DNA, 25 bp, Homo sapiens
cggaaatacacaaatgcttctctgt

SEQ ID NO: 3344 - DNA, 25 bp, Homo sapiens
ctcccgcttgaatctggacgtgaat

SEQ ID NO: 3345 - DNA, 25 bp, Homo sapiens
gcttctctgtaatgtgcaatatgct

SEQ ID NO: 3346 - DNA, 25 bp, Homo sapiens
ggcagggaccccttgggaaatcgag

SEQ ID NO: 3347 - DNA, 25 bp, Homo sapiens
tcccaggtttcacagggctcagggt

SEQ ID NO: 3348 - DNA, 25 bp, Homo sapiens
tcttccttctttctgcaaggcagag

SEQ ID NO: 3349 - DNA, 25 bp, Homo sapiens
ttcacagggctcagggttatgctcc

SEQ ID NO: 3350 - DNA, 25 bp, Homo sapiens
aacctccaacacgatccatttagag

SEQ ID NO: 3351 - DNA, 25 bp, Homo sapiens
caacacgatccatttagaggccaaa

SEQ ID NO: 3352 - DNA, 25 bp, Homo sapiens
caggtgccttcccgatggattaaag

SEQ ID NO: 3353 - DNA, 25 bp, Homo sapiens
cccacctggagctgaatcacatgac

SEQ ID NO: 3354 - DNA, 25 bp, Homo sapiens
cgacccatcctgttcgtgaataggt

SEQ ID NO: 3355 - DNA, 25 bp, Homo sapiens
gccagatttggacactatatttttt

SEQ ID NO: 3356 - DNA, 25 bp, Homo sapiens
gggggagggactgccagatttggac

SEQ ID NO: 3357 - DNA, 25 bp, Homo sapiens
taagcctcgtaaaggtcatcccacc

SEQ ID NO: 3358 - DNA, 25 bp, Homo sapiens
tcgtgaataggtctcaggggttggg

SEQ ID NO: 3359 - DNA, 25 bp, Homo sapiens
ttcaacttgaagatgtgtatttccc

SEQ ID NO: 3360 - DNA, 25 bp, Homo sapiens
tttagaggccaaatgtcattctgca

SEQ ID NO: 3361 - DNA, 25 bp, Homo sapiens
aaaaaggggggcagtcagaacagct

SEQ ID NO: 3362 - DNA, 25 bp, Homo sapiens
aaccatggctactcttgggaaccac

SEQ ID NO: 3363 - DNA, 25 bp, Homo sapiens
atctgaaatattaccccttgtctag

SEQ ID NO: 3364 - DNA, 25 bp, Homo sapiens
atggcctttacatagaagggctctg

SEQ ID NO: 3365 - DNA, 25 bp, Homo sapiens
attggaaagctcttctagctgaatc

SEQ ID NO: 3366 - DNA, 25 bp, Homo sapiens
ccggccatgtggtcgccaagtagag

SEQ ID NO: 3367 - DNA, 25 bp, Homo sapiens
ctcttcccaatcacgtggctgagtg

SEQ ID NO: 3368 - DNA, 25 bp, Homo sapiens
gaagggcgattaacacttttgacag

SEQ ID NO: 3369 - DNA, 25 bp, Homo sapiens
gaagggctctgatttgcacaatttg

SEQ ID NO: 3370 - DNA, 25 bp, Homo sapiens
ggctaagttggggaggctcaaacca

SEQ ID NO: 3371 - DNA, 25 bp, Homo sapiens
gtggtcgccaagtagagcaagcccc

SEQ ID NO: 3372 - DNA, 25 bp, Homo sapiens
aaaacctgttgtcatgaaggctttt

SEQ ID NO: 3373 - DNA, 25 bp, Homo sapiens
agtgacttcaactttggcatttcat

SEQ ID NO: 3374 - DNA, 25 bp, Homo sapiens
atatcccaactgtcctacagatgtg

SEQ ID NO: 3375 - DNA, 25 bp, Homo sapiens
gaaagcacattccgtttataatttt

SEQ ID NO: 3376 - DNA, 25 bp, Homo sapiens
gaatgctctgcagaaatatcccaac

SEQ ID NO: 3377 - DNA, 25 bp, Homo sapiens
gagtaccagctgatgaaactgcttt

SEQ ID NO: 3378 - DNA, 25 bp, Homo sapiens
gcagtgggcaacatcctcactaagc

SEQ ID NO: 3379 - DNA, 25 bp, Homo sapiens
gctgtgtcttgccttttaatcatga

SEQ ID NO: 3380 - DNA, 25 bp, Homo sapiens
ggcatttcattcatacttctgtaga

SEQ ID NO: 3381 - DNA, 25 bp, Homo sapiens
ggtctatcagtcttggaaatctgtc

SEQ ID NO: 3382 - DNA, 25 bp, Homo sapiens
gtatttatgtgagacttgcccatct

SEQ ID NO: 3383 - DNA, 25 bp, Homo sapiens
aacaagtatagtcatggcaccacgt

SEQ ID NO: 3384 - DNA, 25 bp, Homo sapiens
aacagctagatgtctttacaaacct

SEQ ID NO: 3385 - DNA, 25 bp, Homo sapiens
aatggtctatttgaagagctcactt

SEQ ID NO: 3386 - DNA, 25 bp, Homo sapiens
agggactagaccatgtgctttttta

SEQ ID NO: 3387 - DNA, 25 bp, Homo sapiens
atccacatcagaatcccttgtagga

SEQ ID NO: 3388 - DNA, 25 bp, Homo sapiens
gagctcacttcaacctaacagctag

SEQ ID NO: 3389 - DNA, 25 bp, Homo sapiens
gcaggtttgctgcagtgtttttttc

SEQ ID NO: 3390 - DNA, 25 bp, Homo sapiens
gtcatggcaccacgtaacattttgg

SEQ ID NO: 3391 - DNA, 25 bp, Homo sapiens
tacagattgttgagcctaccatagg

SEQ ID NO: 3392 - DNA, 25 bp, Homo sapiens
tctatcccagacccaggttttctag

SEQ ID NO: 3393 - DNA, 25 bp, Homo sapiens
tgtggtactcataccatccacatca

SEQ ID NO: 3394 - DNA, 25 bp, Homo sapiens
aaccctcagcacttgctcagtagtt

SEQ ID NO: 3395 - DNA, 25 bp, Homo sapiens
aggatccggagctggtgctgataac

SEQ ID NO: 3396 - DNA, 25 bp, Homo sapiens
ataaaccctcagcacttgctcagta

SEQ ID NO: 3397 - DNA, 25 bp, Homo sapiens
cagcacttgctcagtagttttgtga

SEQ ID NO: 3398 - DNA, 25 bp, Homo sapiens
ggaacagcgctactgatcaccaagt

SEQ ID NO: 3399 - DNA, 25 bp, Homo sapiens
gtagttttgtgaaagtctcaagtaa

SEQ ID NO: 3400 - DNA, 25 bp, Homo sapiens
gtcctggaacagcgctactgatcac

SEQ ID NO: 3401 - DNA, 25 bp, Homo sapiens
tataataaaccctcagcacttgctc

SEQ ID NO: 3402 - DNA, 25 bp, Homo sapiens
tcaccaagtagccacaaaatataat

SEQ ID NO: 3403 - DNA, 25 bp, Homo sapiens
tgctgataacagcggaatcccccgt

SEQ ID NO: 3404 - DNA, 25 bp, Homo sapiens
ttggtcctggaacagcgctactgat

SEQ ID NO: 3405 - DNA, 25 bp, Homo sapiens
aggccgtggcggaactgagggggct

SEQ ID NO: 3406 - DNA, 25 bp, Homo sapiens
atatgttcatattggattgcgcctt

SEQ ID NO: 3407 - DNA, 25 bp, Homo sapiens
attggattgcgcctttgtattataa

SEQ ID NO: 3408 - DNA, 25 bp, Homo sapiens
cggctaaggtgtttggaggcttcca

SEQ ID NO: 3409 - DNA, 25 bp, Homo sapiens
cttacggcggactccatgtggaggc

SEQ ID NO: 3410 - DNA, 25 bp, Homo sapiens
gcggactccatgtggaggccgtggc

SEQ ID NO: 3411 - DNA, 25 bp, Homo sapiens
gctcagatgacatttcgttttttac

SEQ ID NO: 3412 - DNA, 25 bp, Homo sapiens
taagtgactgaccatgcactatatt

SEQ ID NO: 3413 - DNA, 25 bp, Homo sapiens
tccctccggactctaaacaggaact

SEQ ID NO: 3414 - DNA, 25 bp, Homo sapiens
tggcggaactgagggggctcaggcc

SEQ ID NO: 3415 - DNA, 25 bp, Homo sapiens
ttttatgtgatgccaaagatgtttg

SEQ ID NO: 3416 - DNA, 25 bp, Homo sapiens
aaccaagagcttttacagatccaga

SEQ ID NO: 3417 - DNA, 25 bp, Homo sapiens
aatacactccacttgaagcacttaa

SEQ ID NO: 3418 - DNA, 25 bp, Homo sapiens
aatgcagaatacttgactcatttaa

SEQ ID NO: 3419 - DNA, 25 bp, Homo sapiens
atgatactgtgtgttttcccaaagc

SEQ ID NO: 3420 - DNA, 25 bp, Homo sapiens
atgtcagcattggcctctgtgtaca

SEQ ID NO: 3421 - DNA, 25 bp, Homo sapiens
gaagcacttaagtcttccttaaatg

SEQ ID NO: 3422 - DNA, 25 bp, Homo sapiens
gtctgtaatacactccacttgaagc

SEQ ID NO: 3423 - DNA, 25 bp, Homo sapiens
tactatctgttgaaaaggtgtcctt

SEQ ID NO: 3424 - DNA, 25 bp, Homo sapiens
tacttgtctgtcaaatgtttcctta

SEQ ID NO: 3425 - DNA, 25 bp, Homo sapiens
tggcctctgtgtacaaaccaagagc

SEQ ID NO: 3426 - DNA, 25 bp, Homo sapiens
tttcttaccaaaattcactaatctt

SEQ ID NO: 3427 - DNA, 25 bp, Homo sapiens
aaccctgatccatgggctaagaatc

SEQ ID NO: 3428 - DNA, 25 bp, Homo sapiens
aagactatgagttgctgtgccttga

SEQ ID NO: 3429 - DNA, 25 bp, Homo sapiens
aggaagcttgcgtccacaagatatt

SEQ ID NO: 3430 - DNA, 25 bp, Homo sapiens
aggaccttctgttcagagatgacac

SEQ ID NO: 3431 - DNA, 25 bp, Homo sapiens
caagatattacgtcaacagcagcac

SEQ ID NO: 3432 - DNA, 25 bp, Homo sapiens
ccgaatcacgctgtggtcacacgga

SEQ ID NO: 3433 - DNA, 25 bp, Homo sapiens
gactgctcgggcaacttttgtttgt

SEQ ID NO: 3434 - DNA, 25 bp, Homo sapiens
gcaacgtaactgactgctcgggcaa

SEQ ID NO: 3435 - DNA, 25 bp, Homo sapiens
gttgctgtgccttgatggtaccagg

SEQ ID NO: 3436 - DNA, 25 bp, Homo sapiens
tggaggagtatgcgaactgccacct

SEQ ID NO: 3437 - DNA, 25 bp, Homo sapiens
tgtttggccaaacttcatgacagaa

SEQ ID NO: 3438 - DNA, 25 bp, Homo sapiens
aactggagtccactgagagccgcag

SEQ ID NO: 3439 - DNA, 25 bp, Homo sapiens
ccaccaaagttcaccctgaaggctg

SEQ ID NO: 3440 - DNA, 25 bp, Homo sapiens
gaaggctgggcaggtggtgacgatc

SEQ ID NO: 3441 - DNA, 25 bp, Homo sapiens
gaatggagatgatcccttgctgact

SEQ ID NO: 3442 - DNA, 25 bp, Homo sapiens
ggggcagcgtcaccaaaaagcgcaa

SEQ ID NO: 3443 - DNA, 25 bp, Homo sapiens
tgaggagggcaagtttgtccggctg

SEQ ID NO: 3444 - DNA, 25 bp, Homo sapiens
tggaaggcacagaacacctggggct

SEQ ID NO: 3445 - DNA, 25 bp, Homo sapiens
tggccatgcgcaagctggtgcgctc

SEQ ID NO: 3446 - DNA, 25 bp, Homo sapiens
tggggctgcgggaacagcctgcgta

SEQ ID NO: 3447 - DNA, 25 bp, Homo sapiens
tggtgacgatctgggctgcaggagc

SEQ ID NO: 3448 - DNA, 25 bp, Homo sapiens
aattagacctcaagtctgcctctac

SEQ ID NO: 3449 - DNA, 25 bp, Homo sapiens
atttgttcagtataagctcgttctt

SEQ ID NO: 3450 - DNA, 25 bp, Homo sapiens
gaaaagtcatccctatttccttgtt

SEQ ID NO: 3451 - DNA, 25 bp, Homo sapiens
gaaagcctgagcccattggatctgt

SEQ ID NO: 3452 - DNA, 25 bp, Homo sapiens
gaatcagttaggttcctcactgcaa

SEQ ID NO: 3453 - DNA, 25 bp, Homo sapiens
gaatgggcgtacagtatataccgtg

SEQ ID NO: 3454 - DNA, 25 bp, Homo sapiens
gcccattggatctgtgaaagcctct

SEQ ID NO: 3455 - DNA, 25 bp, Homo sapiens
gcctctagcttcactggtgcagaaa

SEQ ID NO: 3456 - DNA, 25 bp, Homo sapiens
ggtgcagaaaattttcctctagatc

SEQ ID NO: 3457 - DNA, 25 bp, Homo sapiens
gtgggcagctaaatgcagctttgtt

SEQ ID NO: 3458 - DNA, 25 bp, Homo sapiens
tatataccgtgacatcctgaaccct

SEQ ID NO: 3459 - DNA, 25 bp, Homo sapiens
aaatcgccaacttgctgaagccaga

SEQ ID NO: 3460 - DNA, 25 bp, Homo sapiens
acgtcaatgtggccttgcgcaaaat

SEQ ID NO: 3461 - DNA, 25 bp, Homo sapiens
agaatttcgaggagtacctgcgcgc

SEQ ID NO: 3462 - DNA, 25 bp, Homo sapiens
agcagagtctgtctcttggctttgt

SEQ ID NO: 3463 - DNA, 25 bp, Homo sapiens
atccgcacgctgagcacttttagga

SEQ ID NO: 3464 - DNA, 25 bp, Homo sapiens
atgccagtcgacttcactgggtact

SEQ ID NO: 3465 - DNA, 25 bp, Homo sapiens
gacaagctccagtgtgtgcagaagg

SEQ ID NO: 3466 - DNA, 25 bp, Homo sapiens
gagaaggaggggcgtggctggaccc

SEQ ID NO: 3467 - DNA, 25 bp, Homo sapiens
gagatcgtgcaggacggtgaccata

SEQ ID NO: 3468 - DNA, 25 bp, Homo sapiens
ggtgaccatatgatcatccgcacgc

SEQ ID NO: 3469 - DNA, 25 bp, Homo sapiens
tgaggcaaaaatgtccagccacccc

SEQ ID NO: 3470 - DNA, 25 bp, Homo sapiens
aaaaacaatgcttccagtggccact

SEQ ID NO: 3471 - DNA, 25 bp, Homo sapiens
aacaccaggccagaactatagtcat

SEQ ID NO: 3472 - DNA, 25 bp, Homo sapiens
caagatgatctgaacacctctcctt

SEQ ID NO: 3473 - DNA, 25 bp, Homo sapiens
cctctacttgggctttatactgcat

SEQ ID NO: 3474 - DNA, 25 bp, Homo sapiens
ctaaggaggaacaaccccgtctgat

SEQ ID NO: 3475 - DNA, 25 bp, Homo sapiens
ggacctgtacattgtcacattgcat

SEQ ID NO: 3476 - DNA, 25 bp, Homo sapiens
ggcaccacgtgagcttgctaagtga

SEQ ID NO: 3477 - DNA, 25 bp, Homo sapiens
gtccacattcctgcaagcattgatt

SEQ ID NO: 3478 - DNA, 25 bp, Homo sapiens
tccagtggccacttcctaaggagga

SEQ ID NO: 3479 - DNA, 25 bp, Homo sapiens
tctgatctcagaattggcaccacgt

SEQ ID NO: 3480 - DNA, 25 bp, Homo sapiens
tttactcatgagccttcctttgagg

SEQ ID NO: 3481 - DNA, 25 bp, Homo sapiens
ctcccgtagcacactataacatctg

SEQ ID NO: 3482 - DNA, 25 bp, Homo sapiens
ctgccagagaactcctatgcatccc

SEQ ID NO: 3483 - DNA, 25 bp, Homo sapiens
gaatcttgcccgtttatgtatgctc

SEQ ID NO: 3484 - DNA, 25 bp, Homo sapiens
gactcccgagggctagggctagagc

SEQ ID NO: 3485 - DNA, 25 bp, Homo sapiens
gctggagtgttgctgttgcaccata

SEQ ID NO: 3486 - DNA, 25 bp, Homo sapiens
gtcttccccaaaattgatcactccg

SEQ ID NO: 3487 - DNA, 25 bp, Homo sapiens
gttgcaccatactttcttgtacatt

SEQ ID NO: 3488 - DNA, 25 bp, Homo sapiens
taagtgccttgcggtcagggactga

SEQ ID NO: 3489 - DNA, 25 bp, Homo sapiens
tatgtatgctccatgtctagcccat

SEQ ID NO: 3490 - DNA, 25 bp, Homo sapiens
ttacttttgtgaacgcttctgccac

SEQ ID NO: 3491 - DNA, 25 bp, Homo sapiens
ttcatacctctacatgtctgcttga

SEQ ID NO: 3492 - DNA, 25 bp, Homo sapiens
aaacttgtccttagattaatgtgtc

SEQ ID NO: 3493 - DNA, 25 bp, Homo sapiens
aatccaaatattgccgtttcataaa

SEQ ID NO: 3494 - DNA, 25 bp, Homo sapiens
agaactgtctctaccagggtcaaga

SEQ ID NO: 3495 - DNA, 25 bp, Homo sapiens
atcccatcaacaggactacacactt

SEQ ID NO: 3496 - DNA, 25 bp, Homo sapiens
gaactcggggaaacatcccatcaac

SEQ ID NO: 3497 - DNA, 25 bp, Homo sapiens
gaagccaagggttaacccagcaagc

SEQ ID NO: 3498 - DNA, 25 bp, Homo sapiens
gatagtgcagagacttaccagaaga

SEQ ID NO: 3499 - DNA, 25 bp, Homo sapiens
gctgaactgaatggtacttcgtatg

SEQ ID NO: 3500 - DNA, 25 bp, Homo sapiens
gggtgtgtcacactgaaactcaata

SEQ ID NO: 3501 - DNA, 25 bp, Homo sapiens
gttgagtttggctgttgttgcagga

SEQ ID NO: 3502 - DNA, 25 bp, Homo sapiens
ttagatacttgtcactgcctatacc

SEQ ID NO: 3503 - DNA, 25 bp, Homo sapiens
aaatgtttttgtccttgtgagtcca

SEQ ID NO: 3504 - DNA, 25 bp, Homo sapiens
acatgaattgtgtctcaacagaaac

SEQ ID NO: 3505 - DNA, 25 bp, Homo sapiens
attcacagtaatatggttcccgatg

SEQ ID NO: 3506 - DNA, 25 bp, Homo sapiens
ccgatgaacaagtttacccagcctg

SEQ ID NO: 3507 - DNA, 25 bp, Homo sapiens
gaaactattttacctgaactagatt

SEQ ID NO: 3508 - DNA, 25 bp, Homo sapiens
gagtccatctaacatcataattaat

SEQ ID NO: 3509 - DNA, 25 bp, Homo sapiens
gtatttgaggtgagatggctgctct

SEQ ID NO: 3510 - DNA, 25 bp, Homo sapiens
gtcacatgatgtgcatagagatagc

SEQ ID NO: 3511 - DNA, 25 bp, Homo sapiens
tgattaacagttatgtggtcacatg

SEQ ID NO: 3512 - DNA, 25 bp, Homo sapiens
tgtccttgtgagtccatctaacatc

SEQ ID NO: 3513 - DNA, 25 bp, Homo sapiens
tttgctatgctgtaatttgttgtat

SEQ ID NO: 3514 - DNA, 25 bp, Homo sapiens
acggccacaggccactaatcaggag

SEQ ID NO: 3515 - DNA, 25 bp, Homo sapiens
caccttccaccaatactctgtgaag

SEQ ID NO: 3516 - DNA, 25 bp, Homo sapiens
cacggccatggccacagtcatggtg

SEQ ID NO: 3517 - DNA, 25 bp, Homo sapiens
ccctggccaccaccataagccaggc

SEQ ID NO: 3518 - DNA, 25 bp, Homo sapiens
gaccacagtggccaagatcacagtg

SEQ ID NO: 3519 - DNA, 25 bp, Homo sapiens
gatgcacgagggtgacgagggccct

SEQ ID NO: 3520 - DNA, 25 bp, Homo sapiens
gatggcgaggctaacctgggcctcc

SEQ ID NO: 3521 - DNA, 25 bp, Homo sapiens
gcaaaatgtcgcagctggaacgcaa

SEQ ID NO: 3522 - DNA, 25 bp, Homo sapiens
gcagctgagcttcgaggagttcatc

SEQ ID NO: 3523 - DNA, 25 bp, Homo sapiens
ggaacgcaacatagagaccatcatc

SEQ ID NO: 3524 - DNA, 25 bp, Homo sapiens
ggggcctgttatgtcaaactgtctt

SEQ ID NO: 3525 - DNA, 25 bp, Homo sapiens
cacacacaaaatgtacccagtattc

SEQ ID NO: 3526 - DNA, 25 bp, Homo sapiens
cacccactctgctttgactgagcag

SEQ ID NO: 3527 - DNA, 25 bp, Homo sapiens
ctgcttcttaaccccagtaagccac

SEQ ID NO: 3528 - DNA, 25 bp, Homo sapiens
gaggcacgagcaaagtgaagacact

SEQ ID NO: 3529 - DNA, 25 bp, Homo sapiens
gctgctaatcttcagggcactgctg

SEQ ID NO: 3530 - DNA, 25 bp, Homo sapiens
gcttttccctaagccaagggctctt

SEQ ID NO: 3531 - DNA, 25 bp, Homo sapiens
gtacccagtattctaggtagtgccc

SEQ ID NO: 3532 - DNA, 25 bp, Homo sapiens
tattctaggtagtgccctattttac

SEQ ID NO: 3533 - DNA, 25 bp, Homo sapiens
tctcccctctaaggccgaagaaggg

SEQ ID NO: 3534 - DNA, 25 bp, Homo sapiens
tgaagacactggctcatattcctgc

SEQ ID NO: 3535 - DNA, 25 bp, Homo sapiens
ttcttaaccccagtaagccactgcc

SEQ ID NO: 3536 - DNA, 25 bp, Homo sapiens
aaggcatctccaacattctgcagag

SEQ ID NO: 3537 - DNA, 25 bp, Homo sapiens
acctttggctcctcaggaactgaca

SEQ ID NO: 3538 - DNA, 25 bp, Homo sapiens
atctgaacacagtcattccttacga

SEQ ID NO: 3539 - DNA, 25 bp, Homo sapiens
gcatgagaccatgtaacctccgaca

SEQ ID NO: 3540 - DNA, 25 bp, Homo sapiens
gctgacaaacattctctttgccatg

SEQ ID NO: 3541 - DNA, 25 bp, Homo sapiens
gctttcaccgctcattatgtagtct

SEQ ID NO: 3542 - DNA, 25 bp, Homo sapiens
gtcattccatcacagggactgcatg

SEQ ID NO: 3543 - DNA, 25 bp, Homo sapiens
tacgagaagaaagcctctcctccct

SEQ ID NO: 3544 - DNA, 25 bp, Homo sapiens
tatgtagtctggctacagccctcaa

SEQ ID NO: 3545 - DNA, 25 bp, Homo sapiens
tgcctactttgctaacggactacat

SEQ ID NO: 3546 - DNA, 25 bp, Homo sapiens
ttgccgttggcttctagtgctagta

SEQ ID NO: 3547 - DNA, 25 bp, Homo sapiens
aaaattcggcctcctgaaatgacag

SEQ ID NO: 3548 - DNA, 25 bp, Homo sapiens
acagcagggagacttgggtcggcct

SEQ ID NO: 3549 - DNA, 25 bp, Homo sapiens
accacccaggaaaccatcgacaaga

SEQ ID NO: 3550 - DNA, 25 bp, Homo sapiens
agataccccgaagccatggcaagca

SEQ ID NO: 3551 - DNA, 25 bp, Homo sapiens
agcaagtggtggaccaggccacaga

SEQ ID NO: 3552 - DNA, 25 bp, Homo sapiens
caagcaagggcttgcaggacctgaa

SEQ ID NO: 3553 - DNA, 25 bp, Homo sapiens
ccaggccacagaggcggggcagaaa

SEQ ID NO: 3554 - DNA, 25 bp, Homo sapiens
ccccgaagccatggcaagcaagggc

SEQ ID NO: 3555 - DNA, 25 bp, Homo sapiens
gaaaccatcgacaagactgctaacc

SEQ ID NO: 3556 - DNA, 25 bp, Homo sapiens
gagcggcagctcagcaagtggtgga

SEQ ID NO: 3557 - DNA, 25 bp, Homo sapiens
tcgacaagactgctaaccaggcctc

SEQ ID NO: 3558 - DNA, 25 bp, Homo sapiens
aactccgtttactacattctacatg

SEQ ID NO: 3559 - DNA, 25 bp, Homo sapiens
acctgatattcaaagactctggcat

SEQ ID NO: 3560 - DNA, 25 bp, Homo sapiens
agaatttggggtgttctgcaagcca

SEQ ID NO: 3561 - DNA, 25 bp, Homo sapiens
atcgttggaacctgaagaatctgaa

SEQ ID NO: 3562 - DNA, 25 bp, Homo sapiens
atgtactgtatgtcctgtagcccag

SEQ ID NO: 3563 - DNA, 25 bp, Homo sapiens
atgtggcactaaatgcagtttcaga

SEQ ID NO: 3564 - DNA, 25 bp, Homo sapiens
catctttttctactctgtatggaag

SEQ ID NO: 3565 - DNA, 25 bp, Homo sapiens
cgtgatccacacttgaaatactaga

SEQ ID NO: 3566 - DNA, 25 bp, Homo sapiens
gcaagccagtcaaagtggcacagca

SEQ ID NO: 3567 - DNA, 25 bp, Homo sapiens
tctacatggtgtttacgtgatccac

SEQ ID NO: 3568 - DNA, 25 bp, Homo sapiens
tgatagccagtgtgttttcttattt

SEQ ID NO: 3569 - DNA, 25 bp, Homo sapiens
aacagatgcccgaatgctagcgagc

SEQ ID NO: 3570 - DNA, 25 bp, Homo sapiens
aatgggctcaggtattcagtacgga

SEQ ID NO: 3571 - DNA, 25 bp, Homo sapiens
accttcttagaagcctccagatttg

SEQ ID NO: 3572 - DNA, 25 bp, Homo sapiens
agtacggagatgctgccttgagaca

SEQ ID NO: 3573 - DNA, 25 bp, Homo sapiens
cgagaagttattaccgaggcgcggc

SEQ ID NO: 3574 - DNA, 25 bp, Homo sapiens
gaaacctacaatgcgcttactaatt

SEQ ID NO: 3575 - DNA, 25 bp, Homo sapiens
gaacgattcaggtccgtgacgagaa

SEQ ID NO: 3576 - DNA, 25 bp, Homo sapiens
gatatcaccagccgagaaacctaca

SEQ ID NO: 3577 - DNA, 25 bp, Homo sapiens
gctagcgagccagaacattgtgatc

SEQ ID NO: 3578 - DNA, 25 bp, Homo sapiens
ggatgcagatcgtgaagttaccttc

SEQ ID NO: 3579 - DNA, 25 bp, Homo sapiens
tctcctcgtctatgatatcaccagc

SEQ ID NO: 3580 - DNA, 25 bp, Homo sapiens
aaagctaacaccagtcatttatatt

SEQ ID NO: 3581 - DNA, 25 bp, Homo sapiens
aaattgatgacttgttcgtatgttc

SEQ ID NO: 3582 - DNA, 25 bp, Homo sapiens
aagtccagccataagctattttgcc

SEQ ID NO: 3583 - DNA, 25 bp, Homo sapiens
agaacttccaaactcaagtccagcc

SEQ ID NO: 3584 - DNA, 25 bp, Homo sapiens
agagctggggttaggatccggttgg

SEQ ID NO: 3585 - DNA, 25 bp, Homo sapiens
agctattttgccaacatgtcagagt

SEQ ID NO: 3586 - DNA, 25 bp, Homo sapiens
ctctgacatcggatgccctcaaaca

SEQ ID NO: 3587 - DNA, 25 bp, Homo sapiens
gaagtgcctttatctgcttagacct

SEQ ID NO: 3588 - DNA, 25 bp, Homo sapiens
gatgatgcttcaatttcttaatagt

SEQ ID NO: 3589 - DNA, 25 bp, Homo sapiens
taggatccggttggactctgacatc

SEQ ID NO: 3590 - DNA, 25 bp, Homo sapiens
tgccctcaaacatacagaacttcca

SEQ ID NO: 3591 - DNA, 25 bp, Homo sapiens
acacatcgtctttaatgtcactttt

SEQ ID NO: 3592 - DNA, 25 bp, Homo sapiens
acttttttacggttcagatattcat

SEQ ID NO: 3593 - DNA, 25 bp, Homo sapiens
aggacttcttcatgggtcttacagt

SEQ ID NO: 3594 - DNA, 25 bp, Homo sapiens
atgggtcttacagttctatgttaga

SEQ ID NO: 3595 - DNA, 25 bp, Homo sapiens
attttctctgttcctaggacttctt

SEQ ID NO: 3596 - DNA, 25 bp, Homo sapiens
ccgcccccaaggacacagatgggaa

SEQ ID NO: 3597 - DNA, 25 bp, Homo sapiens
gaaacatttgcatacacatcgtctt

SEQ ID NO: 3598 - DNA, 25 bp, Homo sapiens
gaaattcaaacaccacaacagcagt

SEQ ID NO: 3599 - DNA, 25 bp, Homo sapiens
gacaggcttggagtcaaggggcccc

SEQ ID NO: 3600 - DNA, 25 bp, Homo sapiens
gatattcatctatacgtctgtacag

SEQ ID NO: 3601 - DNA, 25 bp, Homo sapiens
tcagccccactgttgatgcaggttt

SEQ ID NO: 3602 - DNA, 25 bp, Homo sapiens
cgactgacctgtctttggaaccaga

SEQ ID NO: 3603 - DNA, 25 bp, Homo sapiens
gaacatcccaagggaactccttcgc

SEQ ID NO: 3604 - DNA, 25 bp, Homo sapiens
gatacggtgattgctagttgtgact

SEQ ID NO: 3605 - DNA, 25 bp, Homo sapiens
gcacaagagttgcttctgggataga

SEQ ID NO: 3606 - DNA, 25 bp, Homo sapiens
gcccgctggagtgctaggtggaggc

SEQ ID NO: 3607 - DNA, 25 bp, Homo sapiens
gtttatacggcttttttgctggtca

SEQ ID NO: 3608 - DNA, 25 bp, Homo sapiens
tgcttcttgctgggggaccagggct

SEQ ID NO: 3609 - DNA, 25 bp, Homo sapiens
ttaaccgcagacactaggcatttgg

SEQ ID NO: 3610 - DNA, 25 bp, Homo sapiens
ttcatttttagcacttctcaccaga

SEQ ID NO: 3611 - DNA, 25 bp, Homo sapiens
ttcgcactggcgttgagtgggaccc

SEQ ID NO: 3612 - DNA, 25 bp, Homo sapiens
tttgctggtcagcagtttgtcccac

SEQ ID NO: 3613 - DNA, 25 bp, Homo sapiens
aggactgaccgcttcataagccagt

SEQ ID NO: 3614 - DNA, 25 bp, Homo sapiens
atttcgaacatctcggccattcaaa

SEQ ID NO: 3615 - DNA, 25 bp, Homo sapiens
ccagcataacctctagcatcgattc

SEQ ID NO: 3616 - DNA, 25 bp, Homo sapiens
gatactctaatcactacattgcttt

SEQ ID NO: 3617 - DNA, 25 bp, Homo sapiens
gatgcagagatgacctctcgctgcc

SEQ ID NO: 3618 - DNA, 25 bp, Homo sapiens
gcaggttccatgaaaacagcccttt

SEQ ID NO: 3619 - DNA, 25 bp, Homo sapiens
gtttctgtcatggtttccatctgtc

SEQ ID NO: 3620 - DNA, 25 bp, Homo sapiens
taagccagtacgtctgagctgagta

SEQ ID NO: 3621 - DNA, 25 bp, Homo sapiens
tgatgtcacctagcagggcttcagg

SEQ ID NO: 3622 - DNA, 25 bp, Homo sapiens
tttccatctgtcctgagcaagtcat

SEQ ID NO: 3623 - DNA, 25 bp, Homo sapiens
ttttccaagcccattgtttctgtca

SEQ ID NO: 3624 - DNA, 25 bp, Homo sapiens
aaaccttccacccagtgctgaattt

SEQ ID NO: 3625 - DNA, 25 bp, Homo sapiens
aaggatgcaacggatcgctgctgtg

SEQ ID NO: 3626 - DNA, 25 bp, Homo sapiens
cagcagatttccagccttctactgc

SEQ ID NO: 3627 - DNA, 25 bp, Homo sapiens
catgactgttgctacaaacgtctgg

SEQ ID NO: 3628 - DNA, 25 bp, Homo sapiens
cgctgctgtgtcactcatgactgtt

SEQ ID NO: 3629 - DNA, 25 bp, Homo sapiens
ctcaactccgtgcttaaccaaagaa

SEQ ID NO: 3630 - DNA, 25 bp, Homo sapiens
ctcggggagcagaatcacctgtgca

SEQ ID NO: 3631 - DNA, 25 bp, Homo sapiens
gctgccacctgttttgctagaaaca

SEQ ID NO: 3632 - DNA, 25 bp, Homo sapiens
gtggcaccaaatttctgagctacaa

SEQ ID NO: 3633 - DNA, 25 bp, Homo sapiens
gtggcgtgggtggcagaggatcccc

SEQ ID NO: 3634 - DNA, 25 bp, Homo sapiens
taccctaaccaagttccttggccat

SEQ ID NO: 3635 - DNA, 25 bp, Homo sapiens
aaatcctgccacccgatgattaaac

SEQ ID NO: 3636 - DNA, 25 bp, Homo sapiens
actcttcatgtgcggtgacaccagc

SEQ ID NO: 3637 - DNA, 25 bp, Homo sapiens
cactccatccccaaattcaagatta

SEQ ID NO: 3638 - DNA, 25 bp, Homo sapiens
ctctttcctgcgacaattctatttg

SEQ ID NO: 3639 - DNA, 25 bp, Homo sapiens
gacagcatgggcactactcttcatg

SEQ ID NO: 3640 - DNA, 25 bp, Homo sapiens
gctggagcattttctatggagcctc

SEQ ID NO: 3641 - DNA, 25 bp, Homo sapiens
ggagcctccgtatgttttaggccca

SEQ ID NO: 3642 - DNA, 25 bp, Homo sapiens
tagaaagatccctgactgcttctca

SEQ ID NO: 3643 - DNA, 25 bp, Homo sapiens
taggcccatgaccttcgtgaggtga

SEQ ID NO: 3644 - DNA, 25 bp, Homo sapiens
tgtcctcacctttatgcatgactgc

SEQ ID NO: 3645 - DNA, 25 bp, Homo sapiens
tgtgtgcctatcggcagatccatcc

SEQ ID NO: 3646 - DNA, 25 bp, Homo sapiens
aaaccaccccaagatgattacactg

SEQ ID NO: 3647 - DNA, 25 bp, Homo sapiens
aaggcctgcgcactgaactgtaagg

SEQ ID NO: 3648 - DNA, 25 bp, Homo sapiens
acgcctgtatattaagcctccgcag

SEQ ID NO: 3649 - DNA, 25 bp, Homo sapiens
agacaaattgctgctgaccttacgc

SEQ ID NO: 3650 - DNA, 25 bp, Homo sapiens
agtactgctgccagatctcttttta

SEQ ID NO: 3651 - DNA, 25 bp, Homo sapiens
cagggcctcagcgctatggaagagt

SEQ ID NO: 3652 - DNA, 25 bp, Homo sapiens
ccacaatgcccttgtgccttttaat

SEQ ID NO: 3653 - DNA, 25 bp, Homo sapiens
gctgcacatggcccaggagtggcac

SEQ ID NO: 3654 - DNA, 25 bp, Homo sapiens
ggaagagtgtccactgaggctgcac

SEQ ID NO: 3655 - DNA, 25 bp, Homo sapiens
ggagtggcaccatgttgcagggaca

SEQ ID NO: 3656 - DNA, 25 bp, Homo sapiens
ttaacatcatgtgcgtctcttggga

SEQ ID NO: 3657 - DNA, 25 bp, Homo sapiens
aaaactacggccatggcagcctgga

SEQ ID NO: 3658 - DNA, 25 bp, Homo sapiens
aagacctacagcaagtgaccagccc

SEQ ID NO: 3659 - DNA, 25 bp, Homo sapiens
aggagttgacggctggatctgggct

SEQ ID NO: 3660 - DNA, 25 bp, Homo sapiens
atcccaactacccttatgagttctc

SEQ ID NO: 3661 - DNA, 25 bp, Homo sapiens
ctccccaatcgacagggcctgaaga

SEQ ID NO: 3662 - DNA, 25 bp, Homo sapiens
ctccttctggtccaagtacatctcg

SEQ ID NO: 3663 - DNA, 25 bp, Homo sapiens
cttttcccacttcatcagatcagga

SEQ ID NO: 3664 - DNA, 25 bp, Homo sapiens
gatgttcagtttgccttggggcttc

SEQ ID NO: 3665 - DNA, 25 bp, Homo sapiens
gcctgaagaaagccgactgctcctt

SEQ ID NO: 3666 - DNA, 25 bp, Homo sapiens
ggaaccaggctctaagacctacagc

SEQ ID NO: 3667 - DNA, 25 bp, Homo sapiens
tctacccagcctacgaggggcagtt

SEQ ID NO: 3668 - DNA, 25 bp, Homo sapiens
actcttacatgatttctaggcccca

SEQ ID NO: 3669 - DNA, 25 bp, Homo sapiens
agaactccagattcctggttcatca

SEQ ID NO: 3670 - DNA, 25 bp, Homo sapiens
attaattctaaccagttgtttgctt

SEQ ID NO: 3671 - DNA, 25 bp, Homo sapiens
gagagctctctacatgaagatgact

SEQ ID NO: 3672 - DNA, 25 bp, Homo sapiens
gatatgctcagtatgctgccacata

SEQ ID NO: 3673 - DNA, 25 bp, Homo sapiens
ggttcatcattctgtattcttactc

SEQ ID NO: 3674 - DNA, 25 bp, Homo sapiens
gtattcttactcactttttcaagtt

SEQ ID NO: 3675 - DNA, 25 bp, Homo sapiens
tactctgtgctagtgtagtcttact

SEQ ID NO: 3676 - DNA, 25 bp, Homo sapiens
tagagaatgtttatggtcccacttg

SEQ ID NO: 3677 - DNA, 25 bp, Homo sapiens
ttatggtcccacttgtatatgaaaa

SEQ ID NO: 3678 - DNA, 25 bp, Homo sapiens
ttttcattgttcattgatatgctca

SEQ ID NO: 3679 - DNA, 25 bp, Homo sapiens
aaggctcttgcgggatggcctgttt

SEQ ID NO: 3680 - DNA, 25 bp, Homo sapiens
agagccagtcaaaggtccagtctcc

SEQ ID NO: 3681 - DNA, 25 bp, Homo sapiens
ccagtgaagggagccggtccttgct

SEQ ID NO: 3682 - DNA, 25 bp, Homo sapiens
ccccctaaccgctgcttgaaagata

SEQ ID NO: 3683 - DNA, 25 bp, Homo sapiens
ccttagctcttagccaaacaccttc

SEQ ID NO: 3684 - DNA, 25 bp, Homo sapiens
cttcctgacaccatgagggccagca

SEQ ID NO: 3685 - DNA, 25 bp, Homo sapiens
gaagtgctgtgaaggctcttgcggg

SEQ ID NO: 3686 - DNA, 25 bp, Homo sapiens
gatactgactgcccaggaatcaaga

SEQ ID NO: 3687 - DNA, 25 bp, Homo sapiens
gattggtatggccttagctcttagc

SEQ ID NO: 3688 - DNA, 25 bp, Homo sapiens
gtcaaaggccgtgttccattcaatg

SEQ ID NO: 3689 - DNA, 25 bp, Homo sapiens
tagaggcagctgtcacgggagttcc

SEQ ID NO: 3690 - DNA, 25 bp, Homo sapiens
acccaggccatgtggttagacgttg

SEQ ID NO: 3691 - DNA, 25 bp, Homo sapiens
agggaagctactgtctacgttaaga

SEQ ID NO: 3692 - DNA, 25 bp, Homo sapiens
catgtagtgctctcagtcttcatac

SEQ ID NO: 3693 - DNA, 25 bp, Homo sapiens
ccttggctctatttggcatggatgg

SEQ ID NO: 3694 - DNA, 25 bp, Homo sapiens
gaatgatcatctgtaatctgagggt

SEQ ID NO: 3695 - DNA, 25 bp, Homo sapiens
gagtcatttctgatgttccagcttc

SEQ ID NO: 3696 - DNA, 25 bp, Homo sapiens
gagtttcacccttaagctgtagaga

SEQ ID NO: 3697 - DNA, 25 bp, Homo sapiens
gggtattgccttggctctatttggc

SEQ ID NO: 3698 - DNA, 25 bp, Homo sapiens
gttccagcttctagccatgtagtgc

SEQ ID NO: 3699 - DNA, 25 bp, Homo sapiens
taccgagaatgatccctcagtctga

SEQ ID NO: 3700 - DNA, 25 bp, Homo sapiens
tatttgtcatatgctcctagagagg

SEQ ID NO: 3701 - DNA, 25 bp, Homo sapiens
aacatgcttctctataggtgcaaag

SEQ ID NO: 3702 - DNA, 25 bp, Homo sapiens
aacctacacatagcatgcgtttaaa

SEQ ID NO: 3703 - DNA, 25 bp, Homo sapiens
actgtgtacttgaggttggctttgg

SEQ ID NO: 3704 - DNA, 25 bp, Homo sapiens
attgaactttctaaaacctacacat

SEQ ID NO: 3705 - DNA, 25 bp, Homo sapiens
gaataacccaaagcctaggtgaggg

SEQ ID NO: 3706 - DNA, 25 bp, Homo sapiens
gccaaactctgacaaaggcttttcc

SEQ ID NO: 3707 - DNA, 25 bp, Homo sapiens
ggtagttgcccatttacaagttcca

SEQ ID NO: 3708 - DNA, 25 bp, Homo sapiens
ggtcagagtcttaaacaggcccagt

SEQ ID NO: 3709 - DNA, 25 bp, Homo sapiens
taaacaggcccagtgctgagttctt

SEQ ID NO: 3710 - DNA, 25 bp, Homo sapiens
tgctgagttctttgtccacttagtc

SEQ ID NO: 3711 - DNA, 25 bp, Homo sapiens
ttgtccacttagtcacacatctttt

SEQ ID NO: 3712 - DNA, 25 bp, Homo sapiens
cagcctgtccatctgtgcataagga

SEQ ID NO: 3713 - DNA, 25 bp, Homo sapiens
ccactgcccctaagctggggtggaa

SEQ ID NO: 3714 - DNA, 25 bp, Homo sapiens
cgatccaccctttcaggctaaggag

SEQ ID NO: 3715 - DNA, 25 bp, Homo sapiens
gaccttgcccaaatagcaccttagg

SEQ ID NO: 3716 - DNA, 25 bp, Homo sapiens
ggaaggatctgctattggggaccca

SEQ ID NO: 3717 - DNA, 25 bp, Homo sapiens
ggggggttcccagatattcagggca

SEQ ID NO: 3718 - DNA, 25 bp, Homo sapiens
ggtgtgtatgttttcaggggccttc

SEQ ID NO: 3719 - DNA, 25 bp, Homo sapiens
gtgaagctggcccatgtgaagcaca

SEQ ID NO: 3720 - DNA, 25 bp, Homo sapiens
tcaggctaaggagctccctatctac

SEQ ID NO: 3721 - DNA, 25 bp, Homo sapiens
tctgagtggcaagggccatctccca

SEQ ID NO: 3722 - DNA, 25 bp, Homo sapiens
tgggtcaatacatccttttgtctcc

SEQ ID NO: 3723 - DNA, 25 bp, Homo sapiens
aaatggctacactcatctgactcat

SEQ ID NO: 3724 - DNA, 25 bp, Homo sapiens
aggtgagcgcattgagccagtggtg

SEQ ID NO: 3725 - DNA, 25 bp, Homo sapiens
agttggtttgtatcttgcctaaggt

SEQ ID NO: 3726 - DNA, 25 bp, Homo sapiens
ctgcatgcagccagccatcaaatag

SEQ ID NO: 3727 - DNA, 25 bp, Homo sapiens
gtagtcatactccctggtgtagtgt

SEQ ID NO: 3728 - DNA, 25 bp, Homo sapiens
gtgcagtttctgacacttgttgttg

SEQ ID NO: 3729 - DNA, 25 bp, Homo sapiens
gttttaattcaacccagccatgcaa

SEQ ID NO: 3730 - DNA, 25 bp, Homo sapiens
tcatctgactcattctttattctat

SEQ ID NO: 3731 - DNA, 25 bp, Homo sapiens
tccaactcttggtattaccctccta

SEQ ID NO: 3732 - DNA, 25 bp, Homo sapiens
tgcctaaggtgcgtagtccaactct

SEQ ID NO: 3733 - DNA, 25 bp, Homo sapiens
ttgctccctaccagctgaacaggga

SEQ ID NO: 3734 - DNA, 25 bp, Homo sapiens
agaggaagtttggcgtggtggtggt

SEQ ID NO: 3735 - DNA, 25 bp, Homo sapiens
atatctgcagtgagagctccagcca

SEQ ID NO: 3736 - DNA, 25 bp, Homo sapiens
cagagcccgagaggaagtttggcgt

SEQ ID NO: 3737 - DNA, 25 bp, Homo sapiens
ccggctccgtgcggatgagggactt

SEQ ID NO: 3738 - DNA, 25 bp, Homo sapiens
ctgaacctgattggcttcgtgtcga

SEQ ID NO: 3739 - DNA, 25 bp, Homo sapiens
gatgctctttccagccaagaggtgg

SEQ ID NO: 3740 - DNA, 25 bp, Homo sapiens
gatttctttggaggatgctctttcc

SEQ ID NO: 3741 - DNA, 25 bp, Homo sapiens
gcattgatggagtccagcagatttc

SEQ ID NO: 3742 - DNA, 25 bp, Homo sapiens
ggagctcgggagcattgatggagtc

SEQ ID NO: 3743 - DNA, 25 bp, Homo sapiens
ggatgagggacttgcggaatccaca

SEQ ID NO: 3744 - DNA, 25 bp, Homo sapiens
ggcttcgtgtcgagaagggagctcg

SEQ ID NO: 3745 - DNA, 25 bp, Homo sapiens
aaaagaaacgcatcctgcactgcct

SEQ ID NO: 3746 - DNA, 25 bp, Homo sapiens
agaaactcttgggccagttctctga

SEQ ID NO: 3747 - DNA, 25 bp, Homo sapiens
agacctgctgaaagggtcgctcctc

SEQ ID NO: 3748 - DNA, 25 bp, Homo sapiens
agttgaccattatctctattcttaa

SEQ ID NO: 3749 - DNA, 25 bp, Homo sapiens
ctcttcacatctgacccgttggaag

SEQ ID NO: 3750 - DNA, 25 bp, Homo sapiens
gaagaagaccggtttggcttccctg

SEQ ID NO: 3751 - DNA, 25 bp, Homo sapiens
gcttccatttcaagtctgggtcctt

SEQ ID NO: 3752 - DNA, 25 bp, Homo sapiens
ggcaccagcatttggttcttctcaa

SEQ ID NO: 3753 - DNA, 25 bp, Homo sapiens
ggtctccctctttggggagctttct

SEQ ID NO: 3754 - DNA, 25 bp, Homo sapiens
gtagcacttccaagatggcaccagc

SEQ ID NO: 3755 - DNA, 25 bp, Homo sapiens
ttctcttgtgtctgccactttggaa

SEQ ID NO: 3756 - DNA, 25 bp, Homo sapiens
aaaaggtgagctaagcctcctcggt

SEQ ID NO: 3757 - DNA, 25 bp, Homo sapiens
acagcctcattattaaggtcttatt

SEQ ID NO: 3758 - DNA, 25 bp, Homo sapiens
ccagtcatacacagcctcattatta

SEQ ID NO: 3759 - DNA, 25 bp, Homo sapiens
cctcctcggtgtttctgattaacag

SEQ ID NO: 3760 - DNA, 25 bp, Homo sapiens
ctccatatcaccagtcatacacagc

SEQ ID NO: 3761 - DNA, 25 bp, Homo sapiens
gcagcacttctgctactaaagttaa

SEQ ID NO: 3762 - DNA, 25 bp, Homo sapiens
gttctgcagcatattagattctaga

SEQ ID NO: 3763 - DNA, 25 bp, Homo sapiens
taaagttaatgtgtttactctcttt

SEQ ID NO: 3764 - DNA, 25 bp, Homo sapiens
tctggagccagcacagtgctcctcc

SEQ ID NO: 3765 - DNA, 25 bp, Homo sapiens
ttccaaccagttctgcagcatatta

SEQ ID NO: 3766 - DNA, 25 bp, Homo sapiens
ttcctttcacgtatttcttttagca

SEQ ID NO: 3767 - DNA, 25 bp, Homo sapiens
agacatttctgcacatggttcacca

SEQ ID NO: 3768 - DNA, 25 bp, Homo sapiens
aggggagagtccagtgagtccaggc

SEQ ID NO: 3769 - DNA, 25 bp, Homo sapiens
atgtggtacttgagggatgcccgct

SEQ ID NO: 3770 - DNA, 25 bp, Homo sapiens
ctcagtctcagccttgtgtttggtc

SEQ ID NO: 3771 - DNA, 25 bp, Homo sapiens
gcaaggggcctatgagggcctcgtt

SEQ ID NO: 3772 - DNA, 25 bp, Homo sapiens
gctcccgaatgtcgcatttggtgga

SEQ ID NO: 3773 - DNA, 25 bp, Homo sapiens
ggtggacgagaaggtgcttccgctg

SEQ ID NO: 3774 - DNA, 25 bp, Homo sapiens
gtcacaggcaaagtccagctcagtc

SEQ ID NO: 3775 - DNA, 25 bp, Homo sapiens
tcacgtggcttcatcagctgtgtgc

SEQ ID NO: 3776 - DNA, 25 bp, Homo sapiens
tcgtcacagatatagttccgcacct

SEQ ID NO: 3777 - DNA, 25 bp, Homo sapiens
tgaaggtttgtccacattcgtcaca

SEQ ID NO: 3778 - DNA, 25 bp, Homo sapiens
aaaggctacatttccatggggccag

SEQ ID NO: 3779 - DNA, 25 bp, Homo sapiens
agcactgtcatgagcctcactaagc

SEQ ID NO: 3780 - DNA, 25 bp, Homo sapiens
agctttagcttgtcttataggatgc

SEQ ID NO: 3781 - DNA, 25 bp, Homo sapiens
gaggcttttgacacagttattagtt

SEQ ID NO: 3782 - DNA, 25 bp, Homo sapiens
gatgcaagactttcaactgactggc

SEQ ID NO: 3783 - DNA, 25 bp, Homo sapiens
gatgcttagtttgccactacacttc

SEQ ID NO: 3784 - DNA, 25 bp, Homo sapiens
gcagcactaccatttattctttcat

SEQ ID NO: 3785 - DNA, 25 bp, Homo sapiens
gctttgtgcttctgactatcaatac

SEQ ID NO: 3786 - DNA, 25 bp, Homo sapiens
ggaacggctggtttaaatggcttca

SEQ ID NO: 3787 - DNA, 25 bp, Homo sapiens
ggtcgcaggagattttggaacggct

SEQ ID NO: 3788 - DNA, 25 bp, Homo sapiens
tacggagcagtgcctagtatctgga

SEQ ID NO: 3789 - DNA, 25 bp, Homo sapiens
aacactatcctgaattatgtgcctg

SEQ ID NO: 3790 - DNA, 25 bp, Homo sapiens
aagcagagaccatgccaaagctata

SEQ ID NO: 3791 - DNA, 25 bp, Homo sapiens
agaccacagatatcttctagacata

SEQ ID NO: 3792 - DNA, 25 bp, Homo sapiens
atggtcctgtattgccagatcggga

SEQ ID NO: 3793 - DNA, 25 bp, Homo sapiens
atgtctcggctagctagaccacaga

SEQ ID NO: 3794 - DNA, 25 bp, Homo sapiens
caaagcttttgagcgccacagggga

SEQ ID NO: 3795 - DNA, 25 bp, Homo sapiens
gatgcatcaacctatcgtcagtcaa

SEQ ID NO: 3796 - DNA, 25 bp, Homo sapiens
ggaatatcatttggactggcagtta

SEQ ID NO: 3797 - DNA, 25 bp, Homo sapiens
ggtttggtgttttctatggtcctgt

SEQ ID NO: 3798 - DNA, 25 bp, Homo sapiens
taaatgctgcggtttggtcaatgga

SEQ ID NO: 3799 - DNA, 25 bp, Homo sapiens
tcgtcagtcaaacccctttaaaatg

SEQ ID NO: 3800 - DNA, 25 bp, Homo sapiens
agcacttagcttaaacaatccgttt

SEQ ID NO: 3801 - DNA, 25 bp, Homo sapiens
agctgatagcacaagttctggcgac

SEQ ID NO: 3802 - DNA, 25 bp, Homo sapiens
agttagattttcctggagcttcgga

SEQ ID NO: 3803 - DNA, 25 bp, Homo sapiens
attagcactgtatcccttgtgccat

SEQ ID NO: 3804 - DNA, 25 bp, Homo sapiens
ctggtacccataatgctgctgttcc

SEQ ID NO: 3805 - DNA, 25 bp, Homo sapiens
cttgtgccatccaacattttgtatg

SEQ ID NO: 3806 - DNA, 25 bp, Homo sapiens
gtatacatgccttgtttaacttgga

SEQ ID NO: 3807 - DNA, 25 bp, Homo sapiens
gtatctgagagacacctgcaagcac

SEQ ID NO: 3808 - DNA, 25 bp, Homo sapiens
tcctctcttctcgctttaaatgatt

SEQ ID NO: 3809 - DNA, 25 bp, Homo sapiens
tctgtactgctttctttaatgtata

SEQ ID NO: 3810 - DNA, 25 bp, Homo sapiens
ttctggcgacaggtagcacgtatct

SEQ ID NO: 3811 - DNA, 25 bp, Homo sapiens
aaggcccaagatgggaaggagatcc

SEQ ID NO: 3812 - DNA, 25 bp, Homo sapiens
atatatcgctcttaagagacggtga

SEQ ID NO: 3813 - DNA, 25 bp, Homo sapiens
ctctctcagagagttttgaaacctg

SEQ ID NO: 3814 - DNA, 25 bp, Homo sapiens
gagacggtgaagttcctatttcaag

SEQ ID NO: 3815 - DNA, 25 bp, Homo sapiens
gcagggtgtgttgtgtggtgtttta

SEQ ID NO: 3816 - DNA, 25 bp, Homo sapiens
ggaaataggcagggtgtgttgtgtg

SEQ ID NO: 3817 - DNA, 25 bp, Homo sapiens
gtaagtggttagtatttcaccagca

SEQ ID NO: 3818 - DNA, 25 bp, Homo sapiens
gttagtatttcaccagcaattatgt

SEQ ID NO: 3819 - DNA, 25 bp, Homo sapiens
taacattgtttcttttagctttatt

SEQ ID NO: 3820 - DNA, 25 bp, Homo sapiens
tatgttgagaataaggccaggcgag

SEQ ID NO: 3821 - DNA, 25 bp, Homo sapiens
tggtgttttaactaggcgcttctct

SEQ ID NO: 3822 - DNA, 25 bp, Homo sapiens
aattgtgaccatcgaggcttctacc

SEQ ID NO: 3823 - DNA, 25 bp, Homo sapiens
acactctacgtgcccaattgtgacc

SEQ ID NO: 3824 - DNA, 25 bp, Homo sapiens
accggaagcggcagtgccgctcctc

SEQ ID NO: 3825 - DNA, 25 bp, Homo sapiens
caagacactgagatgggcccatgcc

SEQ ID NO: 3826 - DNA, 25 bp, Homo sapiens
catgccgtagacatctggactcagt

SEQ ID NO: 3827 - DNA, 25 bp, Homo sapiens
ctgccccactgggagtagcggctaa

SEQ ID NO: 3828 - DNA, 25 bp, Homo sapiens
gaacatggagctgtcatcactcaac

SEQ ID NO: 3829 - DNA, 25 bp, Homo sapiens
gcaactccagactgaggtctaccga

SEQ ID NO: 3830 - DNA, 25 bp, Homo sapiens
gcgcgcctgctgttgcagaggagaa

SEQ ID NO: 3831 - DNA, 25 bp, Homo sapiens
gtggatcggatgggcaagtccctgc

SEQ ID NO: 3832 - DNA, 25 bp, Homo sapiens
taccgaggggctcaaacactctacg

SEQ ID NO: 3833 - DNA, 25 bp, Homo sapiens
atgcgaagggcatcacccaggagca

SEQ ID NO: 3834 - DNA, 25 bp, Homo sapiens
caaccatcgccagaaccatcaatga

SEQ ID NO: 3835 - DNA, 25 bp, Homo sapiens
cttccgcactctacggggagagcga

SEQ ID NO: 3836 - DNA, 25 bp, Homo sapiens
gaagccgaatttgcccgcattatga

SEQ ID NO: 3837 - DNA, 25 bp, Homo sapiens
gagcgatctgtgatgctgagcttct

SEQ ID NO: 3838 - DNA, 25 bp, Homo sapiens
gcactggattacgctgcgttctctt

SEQ ID NO: 3839 - DNA, 25 bp, Homo sapiens
gcatcaagaggatgcccgcctactc

SEQ ID NO: 3840 - DNA, 25 bp, Homo sapiens
gtaatcactcatcccatcagaatgc

SEQ ID NO: 3841 - DNA, 25 bp, Homo sapiens
tgaatgagttcagagcctccttcaa

SEQ ID NO: 3842 - DNA, 25 bp, Homo sapiens
tgaccctggtagatcccaacgggca

SEQ ID NO: 3843 - DNA, 25 bp, Homo sapiens
ttccggatcctggcttctgataagc

SEQ ID NO: 3844 - DNA, 25 bp, Homo sapiens
aagggagcactgggttgactttcag

SEQ ID NO: 3845 - DNA, 25 bp, Homo sapiens
aatggttgactgggtttctctgtat

SEQ ID NO: 3846 - DNA, 25 bp, Homo sapiens
atgtggcctaaaaatgcaacttctt

SEQ ID NO: 3847 - DNA, 25 bp, Homo sapiens
gaacagtaactgccatcaagatgag

SEQ ID NO: 3848 - DNA, 25 bp, Homo sapiens
gctgacagctgacctttgtcatctt

SEQ ID NO: 3849 - DNA, 25 bp, Homo sapiens
ggcatggtacggagatgtttcacga

SEQ ID NO: 3850 - DNA, 25 bp, Homo sapiens
gggtttctctgtatagtactggcat

SEQ ID NO: 3851 - DNA, 25 bp, Homo sapiens
ggtactaaatacctcaacctatggt

SEQ ID NO: 3852 - DNA, 25 bp, Homo sapiens
gtcatctttcttctattttattccc

SEQ ID NO: 3853 - DNA, 25 bp, Homo sapiens
gttcatcagactcctgtgcaacttt

SEQ ID NO: 3854 - DNA, 25 bp, Homo sapiens
gtttcacgaagtttgttcatcagac

SEQ ID NO: 3855 - DNA, 25 bp, Homo sapiens
ccacgatgtaccctgggatcgctga

SEQ ID NO: 3856 - DNA, 25 bp, Homo sapiens
ccgcagtcactttctttgtaacaac

SEQ ID NO: 3857 - DNA, 25 bp, Homo sapiens
cgaatcttctcaatgggggggcggc

SEQ ID NO: 3858 - DNA, 25 bp, Homo sapiens
gcatgcagaaagagatcaccgcgct

SEQ ID NO: 3859 - DNA, 25 bp, Homo sapiens
gcgacttctcaggacgacgaatctt

SEQ ID NO: 3860 - DNA, 25 bp, Homo sapiens
gctgccagacgggcaggtcatcacc

SEQ ID NO: 3861 - DNA, 25 bp, Homo sapiens
ggatcgctgaccgcatgcagaaaga

SEQ ID NO: 3862 - DNA, 25 bp, Homo sapiens
gtatgccaacaacgtcatgtcgggg

SEQ ID NO: 3863 - DNA, 25 bp, Homo sapiens
gtgtgacatcgacatcaggaaggac

SEQ ID NO: 3864 - DNA, 25 bp, Homo sapiens
tcatgtcggggggcaccacgatgta

SEQ ID NO: 3865 - DNA, 25 bp, Homo sapiens
ttcatcggtatggagtcggcgggca

SEQ ID NO: 3866 - DNA, 25 bp, Homo sapiens
ctggggtcccgagaagaacaagatc

SEQ ID NO: 3867 - DNA, 25 bp, Homo sapiens
gacggtgaaaagccagtcctgggcc

SEQ ID NO: 3868 - DNA, 25 bp, Homo sapiens
gagaggggtgccctctgagatcgac

SEQ ID NO: 3869 - DNA, 25 bp, Homo sapiens
gagctctttttcttcaaagcgggct

SEQ ID NO: 3870 - DNA, 25 bp, Homo sapiens
gatctacttcttccgaggcagggac

SEQ ID NO: 3871 - DNA, 25 bp, Homo sapiens
gcagggccactgactggagaggggt

SEQ ID NO: 3872 - DNA, 25 bp, Homo sapiens
ggtgctcagtactgggtgtacgacg

SEQ ID NO: 3873 - DNA, 25 bp, Homo sapiens
tagacaccaatgagattgcaccgct

SEQ ID NO: 3874 - DNA, 25 bp, Homo sapiens
tcaaagcgggctttgtgtggcgcct

SEQ ID NO: 3875 - DNA, 25 bp, Homo sapiens
ttccgaggcagggactactggcgtt

SEQ ID NO: 3876 - DNA, 25 bp, Homo sapiens
ttggttcttccaaggtgctcagtac

SEQ ID NO: 3877 - DNA, 25 bp, Homo sapiens
aaaggctcagatttcttgcagttta

SEQ ID NO: 3878 - DNA, 25 bp, Homo sapiens
cacaccgatgattctgctttttgct

SEQ ID NO: 3879 - DNA, 25 bp, Homo sapiens
cacattacctgttaggcctcagcat

SEQ ID NO: 3880 - DNA, 25 bp, Homo sapiens
cagcccttgggcattgttatacacc

SEQ ID NO: 3881 - DNA, 25 bp, Homo sapiens
gatagtgtattgtcttcacaccgat

SEQ ID NO: 3882 - DNA, 25 bp, Homo sapiens
gcctcagcatggcttatgtgcacgt

SEQ ID NO: 3883 - DNA, 25 bp, Homo sapiens
gctagacgaaaacccacattacctg

SEQ ID NO: 3884 - DNA, 25 bp, Homo sapiens
gtctgaggttgtactattttggcca

SEQ ID NO: 3885 - DNA, 25 bp, Homo sapiens
gtgcacgtgtaaatggagtccctgt

SEQ ID NO: 3886 - DNA, 25 bp, Homo sapiens
tgattatgtagttcatccagccctt

SEQ ID NO: 3887 - DNA, 25 bp, Homo sapiens
tgttgcaaagaagtctgtcccccat

SEQ ID NO: 3888 - DNA, 25 bp, Homo sapiens
agagtgcgtctcggacagcgaatgc

SEQ ID NO: 3889 - DNA, 25 bp, Homo sapiens
cacgcagtgtcctggccagatgaaa

SEQ ID NO: 3890 - DNA, 25 bp, Homo sapiens
cactcccaatttctgaggtccagcc

SEQ ID NO: 3891 - DNA, 25 bp, Homo sapiens
cagtgccaggtggacacgcagtgtc

SEQ ID NO: 3892 - DNA, 25 bp, Homo sapiens
ctgtattccctcttggggtgaccac

SEQ ID NO: 3893 - DNA, 25 bp, Homo sapiens
gaaatgctgccgcaatggctgtggg

SEQ ID NO: 3894 - DNA, 25 bp, Homo sapiens
gccttctctgccccaatgataagga

SEQ ID NO: 3895 - DNA, 25 bp, Homo sapiens
ggagagaaagtttctgcctggccct

SEQ ID NO: 3896 - DNA, 25 bp, Homo sapiens
ggctgaccagaactgcacgcaagag

SEQ ID NO: 3897 - DNA, 25 bp, Homo sapiens
tcaccctagtctcaggcacaggagc

SEQ ID NO: 3898 - DNA, 25 bp, Homo sapiens
tgggaaggtgtcctgtgtcactccc

SEQ ID NO: 3899 - DNA, 25 bp, Homo sapiens
acatcgcaaatttcaacagctacat

SEQ ID NO: 3900 - DNA, 25 bp, Homo sapiens
atgggttgttgctgccatgagcatg

SEQ ID NO: 3901 - DNA, 25 bp, Homo sapiens
ccaagttcttaacctgtggcactga

SEQ ID NO: 3902 - DNA, 25 bp, Homo sapiens
ctcctcaggaaagccagttctccaa

SEQ ID NO: 3903 - DNA, 25 bp, Homo sapiens
gaaatgtatccttctcacaaagtag

SEQ ID NO: 3904 - DNA, 25 bp, Homo sapiens
gaatgttgagttacctcttcatgtt

SEQ ID NO: 3905 - DNA, 25 bp, Homo sapiens
gagcatgtacaacctctggagctag

SEQ ID NO: 3906 - DNA, 25 bp, Homo sapiens
gattctccttggcagtgaactactt

SEQ ID NO: 3907 - DNA, 25 bp, Homo sapiens
gctacattatatttccttctgacac

SEQ ID NO: 3908 - DNA, 25 bp, Homo sapiens
ggagtaccttattatcctacatcgc

SEQ ID NO: 3909 - DNA, 25 bp, Homo sapiens
ttagtttctttgctctacgtgggca

SEQ ID NO: 3910 - DNA, 25 bp, Homo sapiens
aacactcacatacaagttcatactt

SEQ ID NO: 3911 - DNA, 25 bp, Homo sapiens
aactgattgacactgttgattcaca

SEQ ID NO: 3912 - DNA, 25 bp, Homo sapiens
aattacttctttattgacttgtcca

SEQ ID NO: 3913 - DNA, 25 bp, Homo sapiens
actacagtgtaaacatatcccagat

SEQ ID NO: 3914 - DNA, 25 bp, Homo sapiens
agttcttccaagagcttcttagagt

SEQ ID NO: 3915 - DNA, 25 bp, Homo sapiens
atatcccagatgaaaactgctgtat

SEQ ID NO: 3916 - DNA, 25 bp, Homo sapiens
ctttcctctgctcactttaagaact

SEQ ID NO: 3917 - DNA, 25 bp, Homo sapiens
gagtagtatattttgggggcagtca

SEQ ID NO: 3918 - DNA, 25 bp, Homo sapiens
ggaaagctacttaacaatgacaaat

SEQ ID NO: 3919 - DNA, 25 bp, Homo sapiens
gggggcagtcaaggaataaactaca

SEQ ID NO: 3920 - DNA, 25 bp, Homo sapiens
ttatataccatctttcaactgaaca

SEQ ID NO: 3921 - DNA, 25 bp, Homo sapiens
aaatgatgtcggtttgcccagtatc

SEQ ID NO: 3922 - DNA, 25 bp, Homo sapiens
aagcttgtttgtatgttctggcagt

SEQ ID NO: 3923 - DNA, 25 bp, Homo sapiens
atcacttatcttctgtatttttcct

SEQ ID NO: 3924 - DNA, 25 bp, Homo sapiens
cttgccctattttaattctgctata

SEQ ID NO: 3925 - DNA, 25 bp, Homo sapiens
gaaaacaattgccttcacttttaag

SEQ ID NO: 3926 - DNA, 25 bp, Homo sapiens
gaatgttgtcatatcttgccctatt

SEQ ID NO: 3927 - DNA, 25 bp, Homo sapiens
gacctcccagcttgaagccaaatct

SEQ ID NO: 3928 - DNA, 25 bp, Homo sapiens
gatttccaaatcagtcgttttctca

SEQ ID NO: 3929 - DNA, 25 bp, Homo sapiens
gtagccttcaatatacattctgctt

SEQ ID NO: 3930 - DNA, 25 bp, Homo sapiens
taagtgactcatcctgtctgctaac

SEQ ID NO: 3931 - DNA, 25 bp, Homo sapiens
tgtatttttcctctgtcgtgtaaat

SEQ ID NO: 3932 - DNA, 25 bp, Homo sapiens
agttgtagttggatttgtctgttta

SEQ ID NO: 3933 - DNA, 25 bp, Homo sapiens
atggaagggcaaggcacccagggca

SEQ ID NO: 3934 - DNA, 25 bp, Homo sapiens
caggctgggtgtcttggttgtcagt

SEQ ID NO: 3935 - DNA, 25 bp, Homo sapiens
ctcagctccacatgcatagtatcag

SEQ ID NO: 3936 - DNA, 25 bp, Homo sapiens
ctgctcagctccacatgcatagtat

SEQ ID NO: 3937 - DNA, 25 bp, Homo sapiens
gatttgtctgtttatgcttggattc

SEQ ID NO: 3938 - DNA, 25 bp, Homo sapiens
gctccacatgcatagtatcagccct

SEQ ID NO: 3939 - DNA, 25 bp, Homo sapiens
ggatggaagggcaaggcacccaggg

SEQ ID NO: 3940 - DNA, 25 bp, Homo sapiens
gttggatttgtctgtttatgcttgg

SEQ ID NO: 3941 - DNA, 25 bp, Homo sapiens
tccacacccgacaaaggggaacaca

SEQ ID NO: 3942 - DNA, 25 bp, Homo sapiens
tgtctgtttatgcttggattcacca

SEQ ID NO: 3943 - DNA, 25 bp, Homo sapiens
aaaactgctttgtgcatatgttaaa

SEQ ID NO: 3944 - DNA, 25 bp, Homo sapiens
acttgtgcacttagtagtttttaca

SEQ ID NO: 3945 - DNA, 25 bp, Homo sapiens
agcttatttttatgtggtcttatga

SEQ ID NO: 3946 - DNA, 25 bp, Homo sapiens
caaaatgttggctgcgtactccact

SEQ ID NO: 3947 - DNA, 25 bp, Homo sapiens
cccacgtgacaccaccgaatatatt

SEQ ID NO: 3948 - DNA, 25 bp, Homo sapiens
cgtatttagccattacccacgtgac

SEQ ID NO: 3949 - DNA, 25 bp, Homo sapiens
ctgcattttacacatgtgctgatgt

SEQ ID NO: 3950 - DNA, 25 bp, Homo sapiens
gaattttagtcctgaacgctacggg

SEQ ID NO: 3951 - DNA, 25 bp, Homo sapiens
gtactccactggtctgtctttggat

SEQ ID NO: 3952 - DNA, 25 bp, Homo sapiens
gtgctgatgtttacaatgatgccga

SEQ ID NO: 3953 - DNA, 25 bp, Homo sapiens
gtgtgtagactgtaactttttttca

SEQ ID NO: 3954 - DNA, 25 bp, Homo sapiens
acctggcagtagatgtgattgcttc

SEQ ID NO: 3955 - DNA, 25 bp, Homo sapiens
atcagcactggatcttgttgaagtc

SEQ ID NO: 3956 - DNA, 25 bp, Homo sapiens
cacaatacagggttgctatcagcac

SEQ ID NO: 3957 - DNA, 25 bp, Homo sapiens
ctactcccagttcaccagatgaatc

SEQ ID NO: 3958 - DNA, 25 bp, Homo sapiens
gacatgtttcacaacaggcattcca

SEQ ID NO: 3959 - DNA, 25 bp, Homo sapiens
gagaatttaggagacactgtgcact

SEQ ID NO: 3960 - DNA, 25 bp, Homo sapiens
gattgcttcaagctttggtcagaca

SEQ ID NO: 3961 - DNA, 25 bp, Homo sapiens
ggcgaagactacagctaacctggca

SEQ ID NO: 3962 - DNA, 25 bp, Homo sapiens
gttggccacctcagaggaagaggcg

SEQ ID NO: 3963 - DNA, 25 bp, Homo sapiens
tattgtctatgaccaacttcctact

SEQ ID NO: 3964 - DNA, 25 bp, Homo sapiens
ttgaagtcaatcctcagttggccac

SEQ ID NO: 3965 - DNA, 25 bp, Homo sapiens
aacagcgcccaaaggacgcactgag

SEQ ID NO: 3966 - DNA, 25 bp, Homo sapiens
acaattccgcctaggtccacaaggc

SEQ ID NO: 3967 - DNA, 25 bp, Homo sapiens
acgcacacaactactacaattccgc

SEQ ID NO: 3968 - DNA, 25 bp, Homo sapiens
actgagcaacgctattccagctgtc

SEQ ID NO: 3969 - DNA, 25 bp, Homo sapiens
agtgctacagggtccaacatagaac

SEQ ID NO: 3970 - DNA, 25 bp, Homo sapiens
ccagcggacacacgcggtttggttt

SEQ ID NO: 3971 - DNA, 25 bp, Homo sapiens
ccccattcccgcagtgggagcaaac

SEQ ID NO: 3972 - DNA, 25 bp, Homo sapiens
ccctccgctctgtagtgctacaggg

SEQ ID NO: 3973 - DNA, 25 bp, Homo sapiens
gtgggagcaaactgcatgcccagag

SEQ ID NO: 3974 - DNA, 25 bp, Homo sapiens
gtttggtttgcagcgactggcatac

SEQ ID NO: 3975 - DNA, 25 bp, Homo sapiens
tggagagagcagactggcggggggc

SEQ ID NO: 3976 - DNA, 25 bp, Homo sapiens
aacatcatcacgtcgcagaacatct

SEQ ID NO: 3977 - DNA, 25 bp, Homo sapiens
aaggccaagatcaccatcgtggcag

SEQ ID NO: 3978 - DNA, 25 bp, Homo sapiens
acgacacggccaaggccaagatcac

SEQ ID NO: 3979 - DNA, 25 bp, Homo sapiens
agcaacatcatcacgtcgcagaaca

SEQ ID NO: 3980 - DNA, 25 bp, Homo sapiens
caagatcaccatcgtggcaggcgtg

SEQ ID NO: 3981 - DNA, 25 bp, Homo sapiens
cagccatgtccatgggcctggagat

SEQ ID NO: 3982 - DNA, 25 bp, Homo sapiens
caggacgacacggccaaggccaaga

SEQ ID NO: 3983 - DNA, 25 bp, Homo sapiens
catcatcacgtcgcagaacatctgg

SEQ ID NO: 3984 - DNA, 25 bp, Homo sapiens
ggccaagatcaccatcgtggcaggc

SEQ ID NO: 3985 - DNA, 25 bp, Homo sapiens
tcacgtcgcagaacatctgggaggg

SEQ ID NO: 3986 - DNA, 25 bp, Homo sapiens
tcatcacgtcgcagaacatctggga

SEQ ID NO: 3987 - DNA, 25 bp, Homo sapiens
aagggacagacgcagggagacccca

SEQ ID NO: 3988 - DNA, 25 bp, Homo sapiens
accggcagccctggaaggggcactt

SEQ ID NO: 3989 - DNA, 25 bp, Homo sapiens
agaagaagtacacggccaccaaggt

SEQ ID NO: 3990 - DNA, 25 bp, Homo sapiens
agaagcgcgagatgggcgcgggcct

SEQ ID NO: 3991 - DNA, 25 bp, Homo sapiens
cccagggaccaacctgcatggactg

SEQ ID NO: 3992 - DNA, 25 bp, Homo sapiens
gcaaggactacgtctaagggacaga

SEQ ID NO: 3993 - DNA, 25 bp, Homo sapiens
gccagcctgggcacaggctacgacc

SEQ ID NO: 3994 - DNA, 25 bp, Homo sapiens
gctacgaccgcaaggactacgtcta

SEQ ID NO: 3995 - DNA, 25 bp, Homo sapiens
gtcccccacgcgagaagaagtacac

SEQ ID NO: 3996 - DNA, 25 bp, Homo sapiens
tgcatggactgtgaaacctcaccct

SEQ ID NO: 3997 - DNA, 25 bp, Homo sapiens
tgcccgaggcgcagaagcgcgagat

SEQ ID NO: 3998 - DNA, 25 bp, Homo sapiens
agggtcttaatattctgtgttttct

SEQ ID NO: 3999 - DNA, 25 bp, Homo sapiens
atgcactctcttcagggtcttaata

SEQ ID NO: 4000 - DNA, 25 bp, Homo sapiens
gaactgcgttctcaaatgcactctc

SEQ ID NO: 4001 - DNA, 25 bp, Homo sapiens
gacacattaagcctagcatcacatt

SEQ ID NO: 4002 - DNA, 25 bp, Homo sapiens
gctgcccaaaggactaacctatgca

SEQ ID NO: 4003 - DNA, 25 bp, Homo sapiens
ggactagagcaacatcgtgctgccc

SEQ ID NO: 4004 - DNA, 25 bp, Homo sapiens
ggctgtgtcagcaatggctttaatg

SEQ ID NO: 4005 - DNA, 25 bp, Homo sapiens
taatgtgttccctgcaagtggtctc

SEQ ID NO: 4006 - DNA, 25 bp, Homo sapiens
taatttcctatctctacacatttgg

SEQ ID NO: 4007 - DNA, 25 bp, Homo sapiens
tcacaaacccttcaaggctacccta

SEQ ID NO: 4008 - DNA, 25 bp, Homo sapiens
tttcccctgcataatgtacaacagc

SEQ ID NO: 4009 - DNA, 25 bp, Homo sapiens
aaaactgcatcacagtcccattctc

SEQ ID NO: 4010 - DNA, 25 bp, Homo sapiens
agcagcaccaagtctattacaggca

SEQ ID NO: 4011 - DNA, 25 bp, Homo sapiens
atcacttctttgtaatccagttgct

SEQ ID NO: 4012 - DNA, 25 bp, Homo sapiens
atgcttagactacttgaacccataa

SEQ ID NO: 4013 - DNA, 25 bp, Homo sapiens
ccattctccagtgtccatgcaatga

SEQ ID NO: 4014 - DNA, 25 bp, Homo sapiens
gaaggggcttcacggaatgttacaa

SEQ ID NO: 4015 - DNA, 25 bp, Homo sapiens
gtatgacttcagtatattcctggga

SEQ ID NO: 4016 - DNA, 25 bp, Homo sapiens
gtcaaggcattgtatgttgcttctg

SEQ ID NO: 4017 - DNA, 25 bp, Homo sapiens
tccagtttgcatagtatcacttctt

SEQ ID NO: 4018 - DNA, 25 bp, Homo sapiens
tgttgcttctgtggttattattctg

SEQ ID NO: 4019 - DNA, 25 bp, Homo sapiens
ttttctcagttgtctgtatgacttc

SEQ ID NO: 4020 - DNA, 25 bp, Homo sapiens
agacagtttctgacaggcgcaactc

SEQ ID NO: 4021 - DNA, 25 bp, Homo sapiens
ccaaatttcatttcagccacttctg

SEQ ID NO: 4022 - DNA, 25 bp, Homo sapiens
ctcccgcaggtgagaaccctgtgga

SEQ ID NO: 4023 - DNA, 25 bp, Homo sapiens
gaattctctcttctggaatcgcttg

SEQ ID NO: 4024 - DNA, 25 bp, Homo sapiens
gactgagaaggaaccgacccctagt

SEQ ID NO: 4025 - DNA, 25 bp, Homo sapiens
gagacttttatctacttctctctct

SEQ ID NO: 4026 - DNA, 25 bp, Homo sapiens
gcagttccccgagaactttctgatt

SEQ ID NO: 4027 - DNA, 25 bp, Homo sapiens
taagatactccatattcttccccga

SEQ ID NO: 4028 - DNA, 25 bp, Homo sapiens
tagttgagagcaccttgcagttccc

SEQ ID NO: 4029 - DNA, 25 bp, Homo sapiens
tcctccctctgactctaagaattct

SEQ ID NO: 4030 - DNA, 25 bp, Homo sapiens
ttccccgaatcacacagacagtttc

SEQ ID NO: 4031 - DNA, 25 bp, Homo sapiens
aggtcaacctcacatagcatacttt

SEQ ID NO: 4032 - DNA, 25 bp, Homo sapiens
agtccgggagtgcagtcatcacgtt

SEQ ID NO: 4033 - DNA, 25 bp, Homo sapiens
atcaaacctgccatagagttactgt

SEQ ID NO: 4034 - DNA, 25 bp, Homo sapiens
attaacattcactttcaacgggcaa

SEQ ID NO: 4035 - DNA, 25 bp, Homo sapiens
ctttaatttttaccatccatttatg

SEQ ID NO: 4036 - DNA, 25 bp, Homo sapiens
gaggacagtgcttctgacaggaatg

SEQ ID NO: 4037 - DNA, 25 bp, Homo sapiens
gagttactgtttctccatacacaga

SEQ ID NO: 4038 - DNA, 25 bp, Homo sapiens
gtcaagtgttctctaggtcaacctc

SEQ ID NO: 4039 - DNA, 25 bp, Homo sapiens
gtggaccgcgtggactatgacagac

SEQ ID NO: 4040 - DNA, 25 bp, Homo sapiens
gtttgtggagattggagtggctgac

SEQ ID NO: 4041 - DNA, 25 bp, Homo sapiens
tatagctttttaacccggattactg

SEQ ID NO: 4042 - DNA, 25 bp, Homo sapiens
aaaggcgtcacttccacgagagttt

SEQ ID NO: 4043 - DNA, 25 bp, Homo sapiens
aactggtggtggaatgcgtcatgaa

SEQ ID NO: 4044 - DNA, 25 bp, Homo sapiens
ctgagatttccttcatactgggcca

SEQ ID NO: 4045 - DNA, 25 bp, Homo sapiens
gaaagtggctggcatggccaaacct

SEQ ID NO: 4046 - DNA, 25 bp, Homo sapiens
gacgttgacctggactgaagttcgc

SEQ ID NO: 4047 - DNA, 25 bp, Homo sapiens
ggccaaacctaacatgatcatcagt

SEQ ID NO: 4048 - DNA, 25 bp, Homo sapiens
ggggtgtcctggtacatgtgcagaa

SEQ ID NO: 4049 - DNA, 25 bp, Homo sapiens
gtgtgatgcttttgtaggtacctgg

SEQ ID NO: 4050 - DNA, 25 bp, Homo sapiens
gttcgcattgaactctacaacattc

SEQ ID NO: 4051 - DNA, 25 bp, Homo sapiens
gttgttttccctgatttagcaagca

SEQ ID NO: 4052 - DNA, 25 bp, Homo sapiens
taggagtgggctttgccaccaggaa

SEQ ID NO: 4053 - DNA, 25 bp, Homo sapiens
acattttgtacattgtgctttcttt

SEQ ID NO: 4054 - DNA, 25 bp, Homo sapiens
atcatttggttgcgctgacctagga

SEQ ID NO: 4055 - DNA, 25 bp, Homo sapiens
atccgaaagtttccaattccactgt

SEQ ID NO: 4056 - DNA, 25 bp, Homo sapiens
atgcagtgtgatccagttgttttcc

SEQ ID NO: 4057 - DNA, 25 bp, Homo sapiens
cacacccccacagagctaactgggt

SEQ ID NO: 4058 - DNA, 25 bp, Homo sapiens
ccaattccactgtcttgtgttttca

SEQ ID NO: 4059 - DNA, 25 bp, Homo sapiens
gaactgtactactcctaattattgt

SEQ ID NO: 4060 - DNA, 25 bp, Homo sapiens
gagtgccaatttcttactagtacta

SEQ ID NO: 4061 - DNA, 25 bp, Homo sapiens
tgggttacagtgttttatccgaaag

SEQ ID NO: 4062 - DNA, 25 bp, Homo sapiens
ttgcatttttcctttgagtgccaat

SEQ ID NO: 4063 - DNA, 25 bp, Homo sapiens
tttgtcatgaactgtactactccta

SEQ ID NO: 4064 - DNA, 25 bp, Homo sapiens
aatggtgtcttgtagatatgtgcaa

SEQ ID NO: 4065 - DNA, 25 bp, Homo sapiens
atgtcaaacagctgagcaccgtagc

SEQ ID NO: 4066 - DNA, 25 bp, Homo sapiens
atttctcagtcaccaacagatgaat

SEQ ID NO: 4067 - DNA, 25 bp, Homo sapiens
gaaggtgtggttttcatttctcagt

SEQ ID NO: 4068 - DNA, 25 bp, Homo sapiens
gagcaacttgagtttgttgccactg

SEQ ID NO: 4069 - DNA, 25 bp, Homo sapiens
gagcaccgtagcatgcagatgtcaa

SEQ ID NO: 4070 - DNA, 25 bp, Homo sapiens
gcagatgtcaaggcagttaggaagt

SEQ ID NO: 4071 - DNA, 25 bp, Homo sapiens
gccactgagaagcaggcgggttggg

SEQ ID NO: 4072 - DNA, 25 bp, Homo sapiens
tatgttgccaaggctcatcttgaga

SEQ ID NO: 4073 - DNA, 25 bp, Homo sapiens
tgcaaggtagcatgatgagcaactt

SEQ ID NO: 4074 - DNA, 25 bp, Homo sapiens
ttgagaagcaggcgggttgggtggg

SEQ ID NO: 4075 - DNA, 25 bp, Homo sapiens
agtgtgttgacttctatcctgttaa

SEQ ID NO: 4076 - DNA, 25 bp, Homo sapiens
atgataccccaaataggcagtactg

SEQ ID NO: 4077 - DNA, 25 bp, Homo sapiens
caggcagatgaaaccaggtcactgg

SEQ ID NO: 4078 - DNA, 25 bp, Homo sapiens
cattaattaccctactttcattcct

SEQ ID NO: 4079 - DNA, 25 bp, Homo sapiens
cccggtgagcaaaaggttccctgtg

SEQ ID NO: 4080 - DNA, 25 bp, Homo sapiens
ctgagctgttatcttgtgtatggat

SEQ ID NO: 4081 - DNA, 25 bp, Homo sapiens
gaaagtgctggaatacctcaatcaa

SEQ ID NO: 4082 - DNA, 25 bp, Homo sapiens
gctgtggcattgttgatgctcacat

SEQ ID NO: 4083 - DNA, 25 bp, Homo sapiens
gtgtaaatgttatgactccttgata

SEQ ID NO: 4084 - DNA, 25 bp, Homo sapiens
gttactgtctgtagcgttttgtgga

SEQ ID NO: 4085 - DNA, 25 bp, Homo sapiens
tccctgtggggcccccgaagaatga

SEQ ID NO: 4086 - DNA, 25 bp, Homo sapiens
aagttgcagaaatttggtgtacata

SEQ ID NO: 4087 - DNA, 25 bp, Homo sapiens
aattgccacattttcttatggcatt

SEQ ID NO: 4088 - DNA, 25 bp, Homo sapiens
actagaagaattcaactgtctcaag

SEQ ID NO: 4089 - DNA, 25 bp, Homo sapiens
atatctcgcaattccaaactttgtt

SEQ ID NO: 4090 - DNA, 25 bp, Homo sapiens
cgttatccagctcttggtagccaca

SEQ ID NO: 4091 - DNA, 25 bp, Homo sapiens
ctgtctcaagaatcaaggtacccca

SEQ ID NO: 4092 - DNA, 25 bp, Homo sapiens
ggtgtacataaaactgtctccatat

SEQ ID NO: 4093 - DNA, 25 bp, Homo sapiens
gtttgagggactcgttatccagctc

SEQ ID NO: 4094 - DNA, 25 bp, Homo sapiens
tcaaggtaccccaatatatctcgca

SEQ ID NO: 4095 - DNA, 25 bp, Homo sapiens
tcatcttgtacttacacctttcatg

SEQ ID NO: 4096 - DNA, 25 bp, Homo sapiens
tcttggtagccacacctgcaatgta

SEQ ID NO: 4097 - DNA, 25 bp, Homo sapiens
atggctgtctaggaaggaggatgtc

SEQ ID NO: 4098 - DNA, 25 bp, Homo sapiens
atgtggggacccgattagcagaaag

SEQ ID NO: 4099 - DNA, 25 bp, Homo sapiens
ccgataggctgccaccctattaggt

SEQ ID NO: 4100 - DNA, 25 bp, Homo sapiens
ctgtgtattcgccaggaatcacccc

SEQ ID NO: 4101 - DNA, 25 bp, Homo sapiens
gaacgtggacttttacacatgtgca

SEQ ID NO: 4102 - DNA, 25 bp, Homo sapiens
gaagtccgggagatgaatggctgtc

SEQ ID NO: 4103 - DNA, 25 bp, Homo sapiens
ggaggatgtcagtgcacggttagtg

SEQ ID NO: 4104 - DNA, 25 bp, Homo sapiens
gggtccatctgtagcaaatgggttg

SEQ ID NO: 4105 - DNA, 25 bp, Homo sapiens
gtagttgcatcagtttgctgtaaca

SEQ ID NO: 4106 - DNA, 25 bp, Homo sapiens
gtggtgaagcaggtcaggggaggtc

SEQ ID NO: 4107 - DNA, 25 bp, Homo sapiens
gtttgagcagagggcagacttgtaa

SEQ ID NO: 4108 - DNA, 25 bp, Homo sapiens
aatgagcgccacctttaggcagatc

SEQ ID NO: 4109 - DNA, 25 bp, Homo sapiens
atccccatcccttctgaaagtagga

SEQ ID NO: 4110 - DNA, 25 bp, Homo sapiens
cccctacccaattgccagggcaagg

SEQ ID NO: 4111 - DNA, 25 bp, Homo sapiens
gaacagactctggagtgtccattta

SEQ ID NO: 4112 - DNA, 25 bp, Homo sapiens
gagatgaggaaccagccgtcctctc

SEQ ID NO: 4113 - DNA, 25 bp, Homo sapiens
ggagttcacagcaatgaccactctg

SEQ ID NO: 4114 - DNA, 25 bp, Homo sapiens
tagcttatgtgacaaccctcatctt

SEQ ID NO: 4115 - DNA, 25 bp, Homo sapiens
tcaaccacaccatcttggctggagt

SEQ ID NO: 4116 - DNA, 25 bp, Homo sapiens
tgacagtatttgttcctggacccca

SEQ ID NO: 4117 - DNA, 25 bp, Homo sapiens
ttggaggataaacagcctcccccta

SEQ ID NO: 4118 - DNA, 25 bp, Homo sapiens
tttaggcagatcctctgctgccagc

SEQ ID NO: 4119 - DNA, 25 bp, Homo sapiens
aagctaggtcgtgggtcagctctga

SEQ ID NO: 4120 - DNA, 25 bp, Homo sapiens
agccttgtttgtactgtatgccttc

SEQ ID NO: 4121 - DNA, 25 bp, Homo sapiens
agctctgaggatgtatacccctggt

SEQ ID NO: 4122 - DNA, 25 bp, Homo sapiens
atgccttcagcattgcctaggaaca

SEQ ID NO: 4123 - DNA, 25 bp, Homo sapiens
ccctggctcctggtcgggaagggag

SEQ ID NO: 4124 - DNA, 25 bp, Homo sapiens
gaacacgaagcacgatcagtccatc

SEQ ID NO: 4125 - DNA, 25 bp, Homo sapiens
gagggagacctagagatctggctgt

SEQ ID NO: 4126 - DNA, 25 bp, Homo sapiens
gccaaaatgagactctccgtcggca

SEQ ID NO: 4127 - DNA, 25 bp, Homo sapiens
tcaacacttgtatctggcctctgtg

SEQ ID NO: 4128 - DNA, 25 bp, Homo sapiens
tgtgaatgtaccgtctctgctaaac

SEQ ID NO: 4129 - DNA, 25 bp, Homo sapiens
tgtttggttttctcggatacttgcc

SEQ ID NO: 4130 - DNA, 25 bp, Homo sapiens
aaagtagagttcttccacaaacaga

SEQ ID NO: 4131 - DNA, 25 bp, Homo sapiens
aatacattcttcataccaggaccag

SEQ ID NO: 4132 - DNA, 25 bp, Homo sapiens
aatccagaggctagcagttcaactt

SEQ ID NO: 4133 - DNA, 25 bp, Homo sapiens
agatattctgacaccactgactctg

SEQ ID NO: 4134 - DNA, 25 bp, Homo sapiens
agcagttcaacttctgtaacaccag

SEQ ID NO: 4135 - DNA, 25 bp, Homo sapiens
caaagccaaccgatacttttctcca

SEQ ID NO: 4136 - DNA, 25 bp, Homo sapiens
ctcagccgttacctgtgtgtggtga

SEQ ID NO: 4137 - DNA, 25 bp, Homo sapiens
ctgatccagagaatgaaccttttga

SEQ ID NO: 4138 - DNA, 25 bp, Homo sapiens
gtagaggagccgtcaaatccagagg

SEQ ID NO: 4139 - DNA, 25 bp, Homo sapiens
gttcatgtactttgagttccctcag

SEQ ID NO: 4140 - DNA, 25 bp, Homo sapiens
tcaggacccacacgacgggaagaca

SEQ ID NO: 4141 - DNA, 25 bp, Homo sapiens
agctctgactaaatgtgtttaccta

SEQ ID NO: 4142 - DNA, 25 bp, Homo sapiens
agttcccagtatcagaaatgtcctt

SEQ ID NO: 4143 - DNA, 25 bp, Homo sapiens
caagagtttcctcaaaatagttatt

SEQ ID NO: 4144 - DNA, 25 bp, Homo sapiens
gaatcagaatgtctgtgtatttctt

SEQ ID NO: 4145 - DNA, 25 bp, Homo sapiens
gctaaggtgcaataacatttgctac

SEQ ID NO: 4146 - DNA, 25 bp, Homo sapiens
gtaatgaagagctaactgtgttata

SEQ ID NO: 4147 - DNA, 25 bp, Homo sapiens
gtagttatatgcccagactgtatta

SEQ ID NO: 4148 - DNA, 25 bp, Homo sapiens
gtgtatttcttgtctgtttctatgt

SEQ ID NO: 4149 - DNA, 25 bp, Homo sapiens
gtgttataatcatcttgcttttgcc

SEQ ID NO: 4150 - DNA, 25 bp, Homo sapiens
gtttctatgttgtcttatagctctg

SEQ ID NO: 4151 - DNA, 25 bp, Homo sapiens
tcttgatgactaataccattctatg

SEQ ID NO: 4152 - DNA, 25 bp, Homo sapiens
aaaagctgttgtacgtactacggag

SEQ ID NO: 4153 - DNA, 25 bp, Homo sapiens
acagccacagtttatcctgaaccgc

SEQ ID NO: 4154 - DNA, 25 bp, Homo sapiens
ctgcctacgttctctttaaaagctg

SEQ ID NO: 4155 - DNA, 25 bp, Homo sapiens
cttcactttgccttctggttattta

SEQ ID NO: 4156 - DNA, 25 bp, Homo sapiens
gagacaattttgcttcactttgcct

SEQ ID NO: 4157 - DNA, 25 bp, Homo sapiens
gattctacctgattgttattcttgg

SEQ ID NO: 4158 - DNA, 25 bp, Homo sapiens
gtactgattatgaccagattctacc

SEQ ID NO: 4159 - DNA, 25 bp, Homo sapiens
gtccgctcccagatgtatagtactg

SEQ ID NO: 4160 - DNA, 25 bp, Homo sapiens
gtctgaattattctgcctacgttct

SEQ ID NO: 4161 - DNA, 25 bp, Homo sapiens
gttattcttggcctgaagaggtgca

SEQ ID NO: 4162 - DNA, 25 bp, Homo sapiens
tggttatttatggtttctgtctgaa

SEQ ID NO: 4163 - DNA, 25 bp, Homo sapiens
aagccttacagttatcctgcaaggg

SEQ ID NO: 4164 - DNA, 25 bp, Homo sapiens
atagtcccaccttggagcatttatg

SEQ ID NO: 4165 - DNA, 25 bp, Homo sapiens
atcagctgttgcaggcagtgtctta

SEQ ID NO: 4166 - DNA, 25 bp, Homo sapiens
caccttatacatcacttcctgtttt

SEQ ID NO: 4167 - DNA, 25 bp, Homo sapiens
catcaagcatcattgtccccatgca

SEQ ID NO: 4168 - DNA, 25 bp, Homo sapiens
cgcctaggatttcagccatgcgcgc

SEQ ID NO: 4169 - DNA, 25 bp, Homo sapiens
gaagcctaattgtcacatcaagcat

SEQ ID NO: 4170 - DNA, 25 bp, Homo sapiens
gagcaaagcatcggtcatgtgtgta

SEQ ID NO: 4171 - DNA, 25 bp, Homo sapiens
gcatgtctaattcatttactcacca

SEQ ID NO: 4172 - DNA, 25 bp, Homo sapiens
gtgtattttttcatagtcccacctt

SEQ ID NO: 4173 - DNA, 25 bp, Homo sapiens
tctttcttctcgcctaggatttcag

SEQ ID NO: 4174 - DNA, 25 bp, Homo sapiens
aagcctgcgtgtgcatagagcgccc

SEQ ID NO: 4175 - DNA, 25 bp, Homo sapiens
ccagctgcccggctggcaatggtgt

SEQ ID NO: 4176 - DNA, 25 bp, Homo sapiens
ctgtagtcactgggctaatctcccc

SEQ ID NO: 4177 - DNA, 25 bp, Homo sapiens
cttctccctgagcttggtatttgtc

SEQ ID NO: 4178 - DNA, 25 bp, Homo sapiens
gcaatggtgtgagtgtcttggccct

SEQ ID NO: 4179 - DNA, 25 bp, Homo sapiens
gccaactctgactctgaggtgggca

SEQ ID NO: 4180 - DNA, 25 bp, Homo sapiens
gccccaaaaccgttagcagctggct

SEQ ID NO: 4181 - DNA, 25 bp, Homo sapiens
ggaaggtaagtgggccacctgctgg

SEQ ID NO: 4182 - DNA, 25 bp, Homo sapiens
ggaccaaagttgccttaagcctgtg

SEQ ID NO: 4183 - DNA, 25 bp, Homo sapiens
ggtatttgtcatgtgccaactctga

SEQ ID NO: 4184 - DNA, 25 bp, Homo sapiens
gtccccgaaatgttcgtttcttctg

SEQ ID NO: 4185 - DNA, 25 bp, Homo sapiens
agcctagccccaagactttggatcc

SEQ ID NO: 4186 - DNA, 25 bp, Homo sapiens
agttctttcgttctgtgcgcagtaa

SEQ ID NO: 4187 - DNA, 25 bp, Homo sapiens
ctccgtgtgtgcatgtgactgtgct

SEQ ID NO: 4188 - DNA, 25 bp, Homo sapiens
cttgtttatgcaaacgccgagcgcc

SEQ ID NO: 4189 - DNA, 25 bp, Homo sapiens
gacccttgctctgaccggaagagaa

SEQ ID NO: 4190 - DNA, 25 bp, Homo sapiens
gaccggaagagaagtccctatccca

SEQ ID NO: 4191 - DNA, 25 bp, Homo sapiens
gtggccgaaaggtttctgatctccg

SEQ ID NO: 4192 - DNA, 25 bp, Homo sapiens
tcacccaagcacactcacttaaaga

SEQ ID NO: 4193 - DNA, 25 bp, Homo sapiens
tcagtgcgctttcctgcgcgcactg

SEQ ID NO: 4194 - DNA, 25 bp, Homo sapiens
tccccagcgcactgttgagggcagc

SEQ ID NO: 4195 - DNA, 25 bp, Homo sapiens
tcggtaggaggagtcttccacggcc

SEQ ID NO: 4196 - DNA, 25 bp, Homo sapiens
aaagttggagaaaaccatcgatgac

SEQ ID NO: 4197 - DNA, 25 bp, Homo sapiens
agagtttgccgagaggtctgtggca

SEQ ID NO: 4198 - DNA, 25 bp, Homo sapiens
agctggagcgctcggaggagagggc

SEQ ID NO: 4199 - DNA, 25 bp, Homo sapiens
aggccaagcacatcgctgaggattc

SEQ ID NO: 4200 - DNA, 25 bp, Homo sapiens
aggctgagacccgagcagagtttgc

SEQ ID NO: 4201 - DNA, 25 bp, Homo sapiens
gaaggcggctgatgagagcgagaga

SEQ ID NO: 4202 - DNA, 25 bp, Homo sapiens
gacccgagcagagtttgccgagagg

SEQ ID NO: 4203 - DNA, 25 bp, Homo sapiens
gaggagatcaaactgttggaggaga

SEQ ID NO: 4204 - DNA, 25 bp, Homo sapiens
gctgaggattcagaccgcaaatatg

SEQ ID NO: 4205 - DNA, 25 bp, Homo sapiens
tgaaggtcatcgaaaaccgggccat

SEQ ID NO: 4206 - DNA, 25 bp, Homo sapiens
tggagcgctcggaggagagggctga

SEQ ID NO: 4207 - DNA, 25 bp, Homo sapiens
aactagctgggtgcacatatcaaat

SEQ ID NO: 4208 - DNA, 25 bp, Homo sapiens
aagccaggatgtgcatgcatcttga

SEQ ID NO: 4209 - DNA, 25 bp, Homo sapiens
catggtctggcttagtgccaacccc

SEQ ID NO: 4210 - DNA, 25 bp, Homo sapiens
ccctgtttcatgcctaactagctgg

SEQ ID NO: 4211 - DNA, 25 bp, Homo sapiens
cctatctgcatgccaggctcaggga

SEQ ID NO: 4212 - DNA, 25 bp, Homo sapiens
gcaacaaagcagccacagtttcaga

SEQ ID NO: 4213 - DNA, 25 bp, Homo sapiens
gcttcattctgcatacttggacact

SEQ ID NO: 4214 - DNA, 25 bp, Homo sapiens
tgaggacatccatggtaccctccac

SEQ ID NO: 4215 - DNA, 25 bp, Homo sapiens
tggagaggcttgcctatctgcatgc

SEQ ID NO: 4216 - DNA, 25 bp, Homo sapiens
tggggacagaaccttctatgacccg

SEQ ID NO: 4217 - DNA, 25 bp, Homo sapiens
tgtgtgagttggggcggcccagcat

SEQ ID NO: 4218 - DNA, 25 bp, Homo sapiens
aaagatgagatggaccgccagccag

SEQ ID NO: 4219 - DNA, 25 bp, Homo sapiens
caggtgacaagcgtcacttctcctg

SEQ ID NO: 4220 - DNA, 25 bp, Homo sapiens
cccataccttgtttttaatctcctg

SEQ ID NO: 4221 - DNA, 25 bp, Homo sapiens
ctcctcgaccattcgtttgtcaagg

SEQ ID NO: 4222 - DNA, 25 bp, Homo sapiens
ctcgcgcgactgagaaccgtgacat

SEQ ID NO: 4223 - DNA, 25 bp, Homo sapiens
ctgctcctgtttgtctgatgtggca

SEQ ID NO: 4224 - DNA, 25 bp, Homo sapiens
gcactgactgtgaaacctttacctt

SEQ ID NO: 4225 - DNA, 25 bp, Homo sapiens
gcgtagtgttttgacctttctaggt

SEQ ID NO: 4226 - DNA, 25 bp, Homo sapiens
gtgccattactactgtacacggacc

SEQ ID NO: 4227 - DNA, 25 bp, Homo sapiens
tagtgttatcaggcgtcccatacct

SEQ ID NO: 4228 - DNA, 25 bp, Homo sapiens
ttcctttctcactgccttgagagtg

SEQ ID NO: 4229 - DNA, 25 bp, Homo sapiens
agtctgtgctgatcccagtgaatcc

SEQ ID NO: 4230 - DNA, 25 bp, Homo sapiens
atcttttttatgtgccgtgttattg

SEQ ID NO: 4231 - DNA, 25 bp, Homo sapiens
ctatggggatggtccactgtcactg

SEQ ID NO: 4232 - DNA, 25 bp, Homo sapiens
ctcatgctagtagctgccttctgct

SEQ ID NO: 4233 - DNA, 25 bp, Homo sapiens
gacctggaactgaactgagctgctc

SEQ ID NO: 4234 - DNA, 25 bp, Homo sapiens
gctctcagcaccaatgggctcagac

SEQ ID NO: 4235 - DNA, 25 bp, Homo sapiens
gcttcctcgcaactttgtggtagat

SEQ ID NO: 4236 - DNA, 25 bp, Homo sapiens
taccatgaagctctgcgtgactgtc

SEQ ID NO: 4237 - DNA, 25 bp, Homo sapiens
tcagggaaggtcacctgagcccgga

SEQ ID NO: 4238 - DNA, 25 bp, Homo sapiens
tccatgagacacatctcctccatac

SEQ ID NO: 4239 - DNA, 25 bp, Homo sapiens
tttcttacaccgcgaggaagcttcc

SEQ ID NO: 4240 - DNA, 25 bp, Homo sapiens
agatatcaattcccaaacagagcca

SEQ ID NO: 4241 - DNA, 25 bp, Homo sapiens
atatctatagtcacagccctgtaca

SEQ ID NO: 4242 - DNA, 25 bp, Homo sapiens
caccatcccagcaagtcaggatatc

SEQ ID NO: 4243 - DNA, 25 bp, Homo sapiens
caggcttcttctatgaaatgtaaag

SEQ ID NO: 4244 - DNA, 25 bp, Homo sapiens
ccgtctttgtactctggtgattttt

SEQ ID NO: 4245 - DNA, 25 bp, Homo sapiens
cctcccccttgtagatatcaattcc

SEQ ID NO: 4246 - DNA, 25 bp, Homo sapiens
ctttgtacttgcattgattgtataa

SEQ ID NO: 4247 - DNA, 25 bp, Homo sapiens
gagaaataaaatcatcaaaccccaa

SEQ ID NO: 4248 - DNA, 25 bp, Homo sapiens
gagccaaatactctatatctatagt

SEQ ID NO: 4249 - DNA, 25 bp, Homo sapiens
tgcttctagtgctctcatttggaaa

SEQ ID NO: 4250 - DNA, 25 bp, Homo sapiens
tggtctgcatgatttgtgcttctag

SEQ ID NO: 4251 - DNA, 25 bp, Homo sapiens
agaggatggctctatgctggtgact

SEQ ID NO: 4252 - DNA, 25 bp, Homo sapiens
aggccctgcgtgtggatggtgacac

SEQ ID NO: 4253 - DNA, 25 bp, Homo sapiens
atctctcctgcttggtgatttcagc

SEQ ID NO: 4254 - DNA, 25 bp, Homo sapiens
cacatcgcctctggttaaatctctc

SEQ ID NO: 4255 - DNA, 25 bp, Homo sapiens
cccccctaattatccattttctgat

SEQ ID NO: 4256 - DNA, 25 bp, Homo sapiens
gcatgaggtctgccagaaggccctg

SEQ ID NO: 4257 - DNA, 25 bp, Homo sapiens
gctacagcaaagcccattggccaga

SEQ ID NO: 4258 - DNA, 25 bp, Homo sapiens
gctaccagctacagcgtggggttgt

SEQ ID NO: 4259 - DNA, 25 bp, Homo sapiens
tctggttgcctatagtgctctggga

SEQ ID NO: 4260 - DNA, 25 bp, Homo sapiens
tgacccttgatatttttgctggccc

SEQ ID NO: 4261 - DNA, 25 bp, Homo sapiens
tgtggtcctggccaagagctacaat

SEQ ID NO: 4262 - DNA, 25 bp, Homo sapiens
aatacagttctgtcatatgttaagc

SEQ ID NO: 4263 - DNA, 25 bp, Homo sapiens
cacgttgcctctactttatcaatta

SEQ ID NO: 4264 - DNA, 25 bp, Homo sapiens
gtgaaaatcttacaacaggtttatg

SEQ ID NO: 4265 - DNA, 25 bp, Homo sapiens
taacctgcaaaatctgttctaacat

SEQ ID NO: 4266 - DNA, 25 bp, Homo sapiens
taagcaacatctttttaacctgcaa

SEQ ID NO: 4267 - DNA, 25 bp, Homo sapiens
tctgaatattttatctttccttggc

SEQ ID NO: 4268 - DNA, 25 bp, Homo sapiens
tcttcaataaacgtggggagggctc

SEQ ID NO: 4269 - DNA, 25 bp, Homo sapiens
ttaactgagtagctctcctgacttt

SEQ ID NO: 4270 - DNA, 25 bp, Homo sapiens
ttgcagataactttgactttcttct

SEQ ID NO: 4271 - DNA, 25 bp, Homo sapiens
tttaaaatggtttgtcctgatgctt

SEQ ID NO: 4272 - DNA, 25 bp, Homo sapiens
tttgccaatctcaacacccaagttg

SEQ ID NO: 4273 - DNA, 25 bp, Homo sapiens
aatgttttacagtggcttatctttt

SEQ ID NO: 4274 - DNA, 25 bp, Homo sapiens
aattgaaatcttgagggcagctgta

SEQ ID NO: 4275 - DNA, 25 bp, Homo sapiens
agccttattccatttcctgatgttt

SEQ ID NO: 4276 - DNA, 25 bp, Homo sapiens
atccccttcccacttatatattgtg

SEQ ID NO: 4277 - DNA, 25 bp, Homo sapiens
ctgtatctactaatgagccttattc

SEQ ID NO: 4278 - DNA, 25 bp, Homo sapiens
gaaacactgccttgattatacgaat

SEQ ID NO: 4279 - DNA, 25 bp, Homo sapiens
gtttttatatacttgccttatttga

SEQ ID NO: 4280 - DNA, 25 bp, Homo sapiens
tgaatgtttagcagtatccccttcc

SEQ ID NO: 4281 - DNA, 25 bp, Homo sapiens
tgtgtgatatgattttgcttgccta

SEQ ID NO: 4282 - DNA, 25 bp, Homo sapiens
ttccatgtgaaatactctgacttaa

SEQ ID NO: 4283 - DNA, 25 bp, Homo sapiens
ttttcctccataacttttgatttct

SEQ ID NO: 4284 - DNA, 25 bp, Homo sapiens
acacagctgtggctcgtttgaggga

SEQ ID NO: 4285 - DNA, 25 bp, Homo sapiens
acttaccaattgatgttttacgtgc

SEQ ID NO: 4286 - DNA, 25 bp, Homo sapiens
agcatgcaagcttggtcaaactttt

SEQ ID NO: 4287 - DNA, 25 bp, Homo sapiens
attgctgaactcttaggcacatcaa

SEQ ID NO: 4288 - DNA, 25 bp, Homo sapiens
gaagggtatcctttcattaggcaag

SEQ ID NO: 4289 - DNA, 25 bp, Homo sapiens
ggctcgtttgagggattggggtgga

SEQ ID NO: 4290 - DNA, 25 bp, Homo sapiens
gggtaggatgttgctctgaatcact

SEQ ID NO: 4291 - DNA, 25 bp, Homo sapiens
gttgatgactcgaaactgacagtat

SEQ ID NO: 4292 - DNA, 25 bp, Homo sapiens
taattgattcctcgcgacatctttc

SEQ ID NO: 4293 - DNA, 25 bp, Homo sapiens
tgttgctctgaatcactgtgagtct

SEQ ID NO: 4294 - DNA, 25 bp, Homo sapiens
ttacgtgcaaacaacctgaatcttt

SEQ ID NO: 4295 - DNA, 25 bp, Homo sapiens
aatccaagccattaactacacctga

SEQ ID NO: 4296 - DNA, 25 bp, Homo sapiens
caaactggctgtaaccccaaatcca

SEQ ID NO: 4297 - DNA, 25 bp, Homo sapiens
catcaccctgggaaccgggagtgcc

SEQ ID NO: 4298 - DNA, 25 bp, Homo sapiens
ctcactgtgttctgcatggtttgga

SEQ ID NO: 4299 - DNA, 25 bp, Homo sapiens
gacagcagaatgtccctttgcaatg

SEQ ID NO: 4300 - DNA, 25 bp, Homo sapiens
gggccccgggttcaagagagagcgg

SEQ ID NO: 4301 - DNA, 25 bp, Homo sapiens
ggtctgatctcgtgtagccatatag

SEQ ID NO: 4302 - DNA, 25 bp, Homo sapiens
taatcactggccccttgaagacagc

SEQ ID NO: 4303 - DNA, 25 bp, Homo sapiens
tcttctaaatcccaaccgaacttct

SEQ ID NO: 4304 - DNA, 25 bp, Homo sapiens
tgtgtgtgcctcctcaggtatggca

SEQ ID NO: 4305 - DNA, 25 bp, Homo sapiens
tgttccggaaggacatggcctccaa

SEQ ID NO: 4306 - DNA, 25 bp, Homo sapiens
acagtgcagacatctgcgctgtccc

SEQ ID NO: 4307 - DNA, 25 bp, Homo sapiens
agctcagcaggcttggacacctggc

SEQ ID NO: 4308 - DNA, 25 bp, Homo sapiens
caacaaccttatttccatagtgggc

SEQ ID NO: 4309 - DNA, 25 bp, Homo sapiens
caacgactccacaatcctagataag

SEQ ID NO: 4310 - DNA, 25 bp, Homo sapiens
caacttgtcggcgaccaacgactcc

SEQ ID NO: 4311 - DNA, 25 bp, Homo sapiens
catagtgggcatttgcctgggcgtc

SEQ ID NO: 4312 - DNA, 25 bp, Homo sapiens
gcagaaacctggaccacgtctacaa

SEQ ID NO: 4313 - DNA, 25 bp, Homo sapiens
gttccaagtcctcatcctgagaggt

SEQ ID NO: 4314 - DNA, 25 bp, Homo sapiens
tacccgcaggactggttccaagtcc

SEQ ID NO: 4315 - DNA, 25 bp, Homo sapiens
tactcgagctcgggttcatgacgct

SEQ ID NO: 4316 - DNA, 25 bp, Homo sapiens
tgagaggtaacgggtcggaggcgca

SEQ ID NO: 4317 - DNA, 25 bp, Homo sapiens
aaaatggagttatcagttatctgtt

SEQ ID NO: 4318 - DNA, 25 bp, Homo sapiens
aacactaaccaaacaatgcagatct

SEQ ID NO: 4319 - DNA, 25 bp, Homo sapiens
agatcacagagcagcaagttcatac

SEQ ID NO: 4320 - DNA, 25 bp, Homo sapiens
atctgtttgttactgcatcatctgt

SEQ ID NO: 4321 - DNA, 25 bp, Homo sapiens
atcttagaggggtattcttcttgaa

SEQ ID NO: 4322 - DNA, 25 bp, Homo sapiens
gggatgattaaaggcagcatttgat

SEQ ID NO: 4323 - DNA, 25 bp, Homo sapiens
gttacaaggacatggtgagtctatt

SEQ ID NO: 4324 - DNA, 25 bp, Homo sapiens
gtttactgtatcaatttctaatgtt

SEQ ID NO: 4325 - DNA, 25 bp, Homo sapiens
tgatagcagacattgttacaaggac

SEQ ID NO: 4326 - DNA, 25 bp, Homo sapiens
tgcatgttctcctctatcttagagg

SEQ ID NO: 4327 - DNA, 25 bp, Homo sapiens
tttacagctactttaacctatgata

SEQ ID NO: 4328 - DNA, 25 bp, Homo sapiens
actggccttgtgacggtttattctg

SEQ ID NO: 4329 - DNA, 25 bp, Homo sapiens
ctgtgcgagcactgtggtttacaat

SEQ ID NO: 4330 - DNA, 25 bp, Homo sapiens
cttttccgcacagctgtgttgactt

SEQ ID NO: 4331 - DNA, 25 bp, Homo sapiens
gaaaccatttcttcattgtaacgaa

SEQ ID NO: 4332 - DNA, 25 bp, Homo sapiens
gaagctgagcgtgttcttagctcgg

SEQ ID NO: 4333 - DNA, 25 bp, Homo sapiens
gagaactgggcggactcgaaagagt

SEQ ID NO: 4334 - DNA, 25 bp, Homo sapiens
gatgtatggctaagatttcacttta

SEQ ID NO: 4335 - DNA, 25 bp, Homo sapiens
gcagtcgtgaactgtgcgagcactg

SEQ ID NO: 4336 - DNA, 25 bp, Homo sapiens
gcctgtctctctcgagttgatttgg

SEQ ID NO: 4337 - DNA, 25 bp, Homo sapiens
ggcggggaagtttgcgtcttattga

SEQ ID NO: 4338 - DNA, 25 bp, Homo sapiens
gtttatctagcacttgtgacatacc

SEQ ID NO: 4339 - DNA, 25 bp, Homo sapiens
acaacatccctggtgaacgtcgtgc

SEQ ID NO: 4340 - DNA, 25 bp, Homo sapiens
accttctgaagtgtaaccctgtcca

SEQ ID NO: 4341 - DNA, 25 bp, Homo sapiens
cacgtccatcgacatgtggtcagcc

SEQ ID NO: 4342 - DNA, 25 bp, Homo sapiens
ccgtccgctgttactcagctgaggt

SEQ ID NO: 4343 - DNA, 25 bp, Homo sapiens
cctgtccagcgtatctcagcagaag

SEQ ID NO: 4344 - DNA, 25 bp, Homo sapiens
cgtgcccaaactcaatgccacaggg

SEQ ID NO: 4345 - DNA, 25 bp, Homo sapiens
gaccaagctgccagactataagccc

SEQ ID NO: 4346 - DNA, 25 bp, Homo sapiens
gccacagggagggatctgctgcaga

SEQ ID NO: 4347 - DNA, 25 bp, Homo sapiens
gcctctttttcccggcaatgatgtc

SEQ ID NO: 4348 - DNA, 25 bp, Homo sapiens
tataagccctatccgatgtacccgg

SEQ ID NO: 4349 - DNA, 25 bp, Homo sapiens
tcctctttggggccaagctgtactc

SEQ ID NO: 4350 - DNA, 25 bp, Homo sapiens
agctcaacctcaaggagtacaacct

SEQ ID NO: 4351 - DNA, 25 bp, Homo sapiens
aggagtacaacctggtctgagcgcc

SEQ ID NO: 4352 - DNA, 25 bp, Homo sapiens
atcaggggatgtacatctctccctc

SEQ ID NO: 4353 - DNA, 25 bp, Homo sapiens
caggcccagggagacgggatggaga

SEQ ID NO: 4354 - DNA, 25 bp, Homo sapiens
gacaagatcatctactcacacttca

SEQ ID NO: 4355 - DNA, 25 bp, Homo sapiens
gagacgggatggagacacggggcag

SEQ ID NO: 4356 - DNA, 25 bp, Homo sapiens
tactcgcacctggtggactacttcc

SEQ ID NO: 4357 - DNA, 25 bp, Homo sapiens
tcctgtactcgcacctggtggacta

SEQ ID NO: 4358 - DNA, 25 bp, Homo sapiens
tctactcacacttcacgtgtgccac

SEQ ID NO: 4359 - DNA, 25 bp, Homo sapiens
ttcacgtgtgccaccgacacggaga

SEQ ID NO: 4360 - DNA, 25 bp, Homo sapiens
ttttatttcacagttatcaggggat

SEQ ID NO: 4361 - DNA, 25 bp, Homo sapiens
agtattcttagttgttcagttgcca

SEQ ID NO: 4362 - DNA, 25 bp, Homo sapiens
agttagggtttaggcatcattttga

SEQ ID NO: 4363 - DNA, 25 bp, Homo sapiens
cacctcctaccccataggagttaga

SEQ ID NO: 4364 - DNA, 25 bp, Homo sapiens
gcaccttggggttttgtaatgacag

SEQ ID NO: 4365 - DNA, 25 bp, Homo sapiens
gcagaaaaatgattggccccagtcc

SEQ ID NO: 4366 - DNA, 25 bp, Homo sapiens
gttttgcctcacctaataggctggg

SEQ ID NO: 4367 - DNA, 25 bp, Homo sapiens
tggatttgttgccatgtgcaccttg

SEQ ID NO: 4368 - DNA, 25 bp, Homo sapiens
tgtgcttcattccaatctattgctt

SEQ ID NO: 4369 - DNA, 25 bp, Homo sapiens
ttcagttgccaaggatccctgatcc

SEQ ID NO: 4370 - DNA, 25 bp, Homo sapiens
ttgtttgtcccttctacaggcatga

SEQ ID NO: 4371 - DNA, 25 bp, Homo sapiens
ttttttatgatttgtctctgtcacc

SEQ ID NO: 4372 - DNA, 25 bp, Homo sapiens
aaaatcctctggctggctaactgga

SEQ ID NO: 4373 - DNA, 25 bp, Homo sapiens
aaatatcagttactcagccctgggc

SEQ ID NO: 4374 - DNA, 25 bp, Homo sapiens
aaggtcatcatcgattctactttag

SEQ ID NO: 4375 - DNA, 25 bp, Homo sapiens
cagtgcctgctgaatgatttccaaa

SEQ ID NO: 4376 - DNA, 25 bp, Homo sapiens
gagaaggcaggaatgtgtggcagat

SEQ ID NO: 4377 - DNA, 25 bp, Homo sapiens
gccagaagtttgtcaagtcaaccaa

SEQ ID NO: 4378 - DNA, 25 bp, Homo sapiens
ggagaatccaagcgaggtcaacaga

SEQ ID NO: 4379 - DNA, 25 bp, Homo sapiens
ggctcatacttatatagcacttact

SEQ ID NO: 4380 - DNA, 25 bp, Homo sapiens
ggctggctaactggaagcatgtagg

SEQ ID NO: 4381 - DNA, 25 bp, Homo sapiens
ggtgccccaaaatgcaagattttcc

SEQ ID NO: 4382 - DNA, 25 bp, Homo sapiens
tgagtttttatggggctgaacgggg

SEQ ID NO: 4383 - DNA, 25 bp, Homo sapiens
actgtgtcttattccatctatgagc

SEQ ID NO: 4384 - DNA, 25 bp, Homo sapiens
ccaggaaacacgctggctcatgcct

SEQ ID NO: 4385 - DNA, 25 bp, Homo sapiens
ctcatggggactcctacccatttga

SEQ ID NO: 4386 - DNA, 25 bp, Homo sapiens
gaacgctggacggatggtagcagtc

SEQ ID NO: 4387 - DNA, 25 bp, Homo sapiens
gagctttgtcagtgcgcgtagatgt

SEQ ID NO: 4388 - DNA, 25 bp, Homo sapiens
ggattaacttcctgtatgctgcaac

SEQ ID NO: 4389 - DNA, 25 bp, Homo sapiens
ggtttttgaatgtctttcactcctt

SEQ ID NO: 4390 - DNA, 25 bp, Homo sapiens
gtatgggacattcctctgatcctaa

SEQ ID NO: 4391 - DNA, 25 bp, Homo sapiens
tatgctgcaactcatgaacttggcc

SEQ ID NO: 4392 - DNA, 25 bp, Homo sapiens
tcggaggagatgctcacttcgatga

SEQ ID NO: 4393 - DNA, 25 bp, Homo sapiens
tgcgcctgggacaggtctcggagga

SEQ ID NO: 4394 - DNA, 25 bp, Homo sapiens
agaactcgaaaacttggctgcaatg

SEQ ID NO: 4395 - DNA, 25 bp, Homo sapiens
aggacagggctgaccagacagtcct

SEQ ID NO: 4396 - DNA, 25 bp, Homo sapiens
atgacagggtggcccaactggacca

SEQ ID NO: 4397 - DNA, 25 bp, Homo sapiens
caatgactgtgctactgtctttgga

SEQ ID NO: 4398 - DNA, 25 bp, Homo sapiens
cagctgagtttccagacttctatga

SEQ ID NO: 4399 - DNA, 25 bp, Homo sapiens
cagggtccccaagctggacctgaaa

SEQ ID NO: 4400 - DNA, 25 bp, Homo sapiens
ctgtttttcaccacttcactgaaag

SEQ ID NO: 4401 - DNA, 25 bp, Homo sapiens
gacttgtagcatattcttttctgca

SEQ ID NO: 4402 - DNA, 25 bp, Homo sapiens
gcagccatcacatgatctgtttttc

SEQ ID NO: 4403 - DNA, 25 bp, Homo sapiens
tgactgtcattggagcggtgggcac

SEQ ID NO: 4404 - DNA, 25 bp, Homo sapiens
tgagaagagaaacctcgccagggtc

SEQ ID NO: 4405 - DNA, 25 bp, Homo sapiens
cagaccgaccctgaagcagaactct

SEQ ID NO: 4406 - DNA, 25 bp, Homo sapiens
catgtgcaatgacttcttccagggc

SEQ ID NO: 4407 - DNA, 25 bp, Homo sapiens
ccaggactgttgatgcctttgagtt

SEQ ID NO: 4408 - DNA, 25 bp, Homo sapiens
cctggcactcatcactgtcatgtgc

SEQ ID NO: 4409 - DNA, 25 bp, Homo sapiens
cctggtctgccacagatccatgatg

SEQ ID NO: 4410 - DNA, 25 bp, Homo sapiens
ctgaagcagaactcttgacttcctg

SEQ ID NO: 4411 - DNA, 25 bp, Homo sapiens
gagggcgacaagttcaagctgagta

SEQ ID NO: 4412 - DNA, 25 bp, Homo sapiens
gatgtgcagttctctggagcaggcg

SEQ ID NO: 4413 - DNA, 25 bp, Homo sapiens
ggaacttctgcacaaggagctgccc

SEQ ID NO: 4414 - DNA, 25 bp, Homo sapiens
tcttgggcccaggactgttgatgcc

SEQ ID NO: 4415 - DNA, 25 bp, Homo sapiens
ttccacaagtactcctgccaagagg

SEQ ID NO: 4416 - DNA, 25 bp, Homo sapiens
aacccgcctgtgccatatttcggga

SEQ ID NO: 4417 - DNA, 25 bp, Homo sapiens
accttgtcctatgtccagatctaat

SEQ ID NO: 4418 - DNA, 25 bp, Homo sapiens
aggtttacgccaatggccagcacct

SEQ ID NO: 4419 - DNA, 25 bp, Homo sapiens
cagttctttgatctgtccattcgct

SEQ ID NO: 4420 - DNA, 25 bp, Homo sapiens
cgctgtggcttggatcgcttcaagg

SEQ ID NO: 4421 - DNA, 25 bp, Homo sapiens
cggacattgccatcaacagctgaac

SEQ ID NO: 4422 - DNA, 25 bp, Homo sapiens
gacatagctctgcacattaatcccc

SEQ ID NO: 4423 - DNA, 25 bp, Homo sapiens
gagggctcacagctcgaagaaccat

SEQ ID NO: 4424 - DNA, 25 bp, Homo sapiens
ggtccggaacagccttctgaatggc

SEQ ID NO: 4425 - DNA, 25 bp, Homo sapiens
tcatcaagggctatgtgcctcccac

SEQ ID NO: 4426 - DNA, 25 bp, Homo sapiens
ttaatccccgcatgggcaacggtac

SEQ ID NO: 4427 - DNA, 25 bp, Homo sapiens
aaacaccttttagtattgatagctt

SEQ ID NO: 4428 - DNA, 25 bp, Homo sapiens
aaaggtgctatcgttcaacttcaaa

SEQ ID NO: 4429 - DNA, 25 bp, Homo sapiens
acatgggtatgctgtagctaacttt

SEQ ID NO: 4430 - DNA, 25 bp, Homo sapiens
ggttgcctaaagtggctatagttac

SEQ ID NO: 4431 - DNA, 25 bp, Homo sapiens
gtattgatagcttacatatggccaa

SEQ ID NO: 4432 - DNA, 25 bp, Homo sapiens
gtggatgtatgttcaaacacctttt

SEQ ID NO: 4433 - DNA, 25 bp, Homo sapiens
taatttctttacatactcaaaacca

SEQ ID NO: 4434 - DNA, 25 bp, Homo sapiens
tcaacttcaaaacatgtttcctagt

SEQ ID NO: 4435 - DNA, 25 bp, Homo sapiens
tctgggaggattttttggttgccta

SEQ ID NO: 4436 - DNA, 25 bp, Homo sapiens
ttaacaactaccttatttttcactg

SEQ ID NO: 4437 - DNA, 25 bp, Homo sapiens
ttttcactgtacagacactaattca

SEQ ID NO: 4438 - DNA, 25 bp, Homo sapiens
aacccattttgtgccacatgcaagt

SEQ ID NO: 4439 - DNA, 25 bp, Homo sapiens
acaacgctgcatatacaggtaccat

SEQ ID NO: 4440 - DNA, 25 bp, Homo sapiens
atatggtgctcattctcatccatcc

SEQ ID NO: 4441 - DNA, 25 bp, Homo sapiens
gaaaatgtaccttggtgccaccaac

SEQ ID NO: 4442 - DNA, 25 bp, Homo sapiens
gaaacagggctgattcttgattccc

SEQ ID NO: 4443 - DNA, 25 bp, Homo sapiens
gaggatgccgaactctgatggcaat

SEQ ID NO: 4444 - DNA, 25 bp, Homo sapiens
tatgatttccgatgaccctaagtcc

SEQ ID NO: 4445 - DNA, 25 bp, Homo sapiens
tcaactctccttttcctatttgaat

SEQ ID NO: 4446 - DNA, 25 bp, Homo sapiens
tgaattccgctgactctaatttatg

SEQ ID NO: 4447 - DNA, 25 bp, Homo sapiens
ttcttgattcccaattctcaactct

SEQ ID NO: 4448 - DNA, 25 bp, Homo sapiens
tttaggaaataccgatgcctttgtg

SEQ ID NO: 4449 - DNA, 25 bp, Homo sapiens
acactgcattcgttgctccagtata

SEQ ID NO: 4450 - DNA, 25 bp, Homo sapiens
acatgcatgagcacctttctggctt

SEQ ID NO: 4451 - DNA, 25 bp, Homo sapiens
caatcttgcccttaatatccctgga

SEQ ID NO: 4452 - DNA, 25 bp, Homo sapiens
cacagttccacaattttgtctctag

SEQ ID NO: 4453 - DNA, 25 bp, Homo sapiens
ctcattcttctaaaactactgcctt

SEQ ID NO: 4454 - DNA, 25 bp, Homo sapiens
gaactcacagactgctgtcttacta

SEQ ID NO: 4455 - DNA, 25 bp, Homo sapiens
ggtcttgccctattataattgtcat

SEQ ID NO: 4456 - DNA, 25 bp, Homo sapiens
gtccacatacactgcattcgttgct

SEQ ID NO: 4457 - DNA, 25 bp, Homo sapiens
taatatccctggagttcctcatcag

SEQ ID NO: 4458 - DNA, 25 bp, Homo sapiens
tgtgtaactttattggtcttgccct

SEQ ID NO: 4459 - DNA, 25 bp, Homo sapiens
ttttctaattgtacccttcttgtct

SEQ ID NO: 4460 - DNA, 25 bp, Homo sapiens
atatgtctgataccgttgttataac

SEQ ID NO: 4461 - DNA, 25 bp, Homo sapiens
atgctgatttgcttctggtttctgt

SEQ ID NO: 4462 - DNA, 25 bp, Homo sapiens
atggggaatgcttgtcactgtggag

SEQ ID NO: 4463 - DNA, 25 bp, Homo sapiens
cactctacactatacagtaccttgt

SEQ ID NO: 4464 - DNA, 25 bp, Homo sapiens
ccttctctgatttcttcagcagggt

SEQ ID NO: 4465 - DNA, 25 bp, Homo sapiens
ctaccatgtcgcacactttgttaat

SEQ ID NO: 4466 - DNA, 25 bp, Homo sapiens
gcaaggccattgcaacaggcattta

SEQ ID NO: 4467 - DNA, 25 bp, Homo sapiens
ggcattgccaagtgtgtgtcgctca

SEQ ID NO: 4468 - DNA, 25 bp, Homo sapiens
ggggcatttgtaaaggtgtccctgg

SEQ ID NO: 4469 - DNA, 25 bp, Homo sapiens
gtgtgtcgctcataggactagtgta

SEQ ID NO: 4470 - DNA, 25 bp, Homo sapiens
gttaatgacaaacttcactctacac

SEQ ID NO: 4471 - DNA, 25 bp, Homo sapiens
aaagcttctatggttgacattgtat

SEQ ID NO: 4472 - DNA, 25 bp, Homo sapiens
catgcccagccgaaaagcttttgag

SEQ ID NO: 4473 - DNA, 25 bp, Homo sapiens
gacattggtattctgggcagcttcc

SEQ ID NO: 4474 - DNA, 25 bp, Homo sapiens
gcatttctaggacttttctaacata

SEQ ID NO: 4475 - DNA, 25 bp, Homo sapiens
gcttttgaggggctgacttcaatcc

SEQ ID NO: 4476 - DNA, 25 bp, Homo sapiens
ggcctcccaaagatgctagtattat

SEQ ID NO: 4477 - DNA, 25 bp, Homo sapiens
gggcagcttcctaatatgctttaca

SEQ ID NO: 4478 - DNA, 25 bp, Homo sapiens
gggctgacttcaatccatgtaggaa

SEQ ID NO: 4479 - DNA, 25 bp, Homo sapiens
gttaagtgcaggagacattggtatt

SEQ ID NO: 4480 - DNA, 25 bp, Homo sapiens
taagactactatacaaactacagag

SEQ ID NO: 4481 - DNA, 25 bp, Homo sapiens
tacaatctgcactttaactgactta

SEQ ID NO: 4482 - DNA, 25 bp, Homo sapiens
aggcagtggcaagtaagttatagaa

SEQ ID NO: 4483 - DNA, 25 bp, Homo sapiens
atagggtccttgtaagttattgatg

SEQ ID NO: 4484 - DNA, 25 bp, Homo sapiens
caaggagggagaacccgggctgtgt

SEQ ID NO: 4485 - DNA, 25 bp, Homo sapiens
cgtgctcatcctctaagcttgaaga

SEQ ID NO: 4486 - DNA, 25 bp, Homo sapiens
gaacccgggctgtgttgggtggttg

SEQ ID NO: 4487 - DNA, 25 bp, Homo sapiens
gaacggaatgtgtggggtatagaaa

SEQ ID NO: 4488 - DNA, 25 bp, Homo sapiens
gaataagcgttgtttttcaaatagg

SEQ ID NO: 4489 - DNA, 25 bp, Homo sapiens
gattgactggggagggcttaaaatg

SEQ ID NO: 4490 - DNA, 25 bp, Homo sapiens
gtgttgggtggttgccaatttccta

SEQ ID NO: 4491 - DNA, 25 bp, Homo sapiens
gttgtagtaaacgcgtgctcatcct

SEQ ID NO: 4492 - DNA, 25 bp, Homo sapiens
gtttaaattcacatctcaaggaggg

SEQ ID NO: 4493 - DNA, 25 bp, Homo sapiens
attcttctaattgctgtgtgtccca

SEQ ID NO: 4494 - DNA, 25 bp, Homo sapiens
cccaggcagggagacggtttccagg

SEQ ID NO: 4495 - DNA, 25 bp, Homo sapiens
ctcttcttggggcccagtgcatggt

SEQ ID NO: 4496 - DNA, 25 bp, Homo sapiens
gaagccgtgaattcagttggttcgt

SEQ ID NO: 4497 - DNA, 25 bp, Homo sapiens
gcatggtggccagaggtgtcaccca

SEQ ID NO: 4498 - DNA, 25 bp, Homo sapiens
ggactgctacctttcaaagcttgga

SEQ ID NO: 4499 - DNA, 25 bp, Homo sapiens
ggttcgttctgtactgttactgggc

SEQ ID NO: 4500 - DNA, 25 bp, Homo sapiens
gtcacccaaaccggcaggtgcgatt

SEQ ID NO: 4501 - DNA, 25 bp, Homo sapiens
taacacttcttacgcaatgcttcta

SEQ ID NO: 4502 - DNA, 25 bp, Homo sapiens
tactgggccctgagtctgggcagct

SEQ ID NO: 4503 - DNA, 25 bp, Homo sapiens
tgcgattttgttaacccagcgacga

SEQ ID NO: 4504 - DNA, 25 bp, Homo sapiens
atgtggcagatctacatgtctagag

SEQ ID NO: 4505 - DNA, 25 bp, Homo sapiens
atgtttgtccttgggtccattttct

SEQ ID NO: 4506 - DNA, 25 bp, Homo sapiens
gaacactgtgctctattaccattat

SEQ ID NO: 4507 - DNA, 25 bp, Homo sapiens
gtaagtctttaatgccgatatcttc

SEQ ID NO: 4508 - DNA, 25 bp, Homo sapiens
gtccttgggtccattttctatgctt

SEQ ID NO: 4509 - DNA, 25 bp, Homo sapiens
taagcaaacttacaggtcctgctga

SEQ ID NO: 4510 - DNA, 25 bp, Homo sapiens
tactggctgccagaatctagagcaa

SEQ ID NO: 4511 - DNA, 25 bp, Homo sapiens
tagagatggtttctactggctgcca

SEQ ID NO: 4512 - DNA, 25 bp, Homo sapiens
tatttccctcccaagtaaatgtttg

SEQ ID NO: 4513 - DNA, 25 bp, Homo sapiens
tgatatgcttctttgtgttatttcc

SEQ ID NO: 4514 - DNA, 25 bp, Homo sapiens
ttatgttctaagtgcctccaagttc

SEQ ID NO: 4515 - DNA, 25 bp, Homo sapiens
aaactgcttagatgacggggcctcc

SEQ ID NO: 4516 - DNA, 25 bp, Homo sapiens
aactgacagatgaccgcaataatga

SEQ ID NO: 4517 - DNA, 25 bp, Homo sapiens
cctccccaggcgatggacaattatg

SEQ ID NO: 4518 - DNA, 25 bp, Homo sapiens
gaatttctgttagcaatatgttagc

SEQ ID NO: 4519 - DNA, 25 bp, Homo sapiens
gcaggggaggtctggatgtgacacc

SEQ ID NO: 4520 - DNA, 25 bp, Homo sapiens
gtgatacatgccgaatgccacacgt

SEQ ID NO: 4521 - DNA, 25 bp, Homo sapiens
tccactggagttcactttcaattgc

SEQ ID NO: 4522 - DNA, 25 bp, Homo sapiens
tctttccctgggaaggctgggggca

SEQ ID NO: 4523 - DNA, 25 bp, Homo sapiens
tgccgaatgccacacgtaaacactt

SEQ ID NO: 4524 - DNA, 25 bp, Homo sapiens
tggagttcactttcaattgcttctg

SEQ ID NO: 4525 - DNA, 25 bp, Homo sapiens
ttagcaagagagggcactcccaggc

SEQ ID NO: 4526 - DNA, 25 bp, Homo sapiens
acagtagagccagcttggggccacc

SEQ ID NO: 4527 - DNA, 25 bp, Homo sapiens
agggcagctgctatttattttccta

SEQ ID NO: 4528 - DNA, 25 bp, Homo sapiens
aggtgattggaccaggccattctgc

SEQ ID NO: 4529 - DNA, 25 bp, Homo sapiens
ccaaccctatctcctgacagaaggt

SEQ ID NO: 4530 - DNA, 25 bp, Homo sapiens
cttctccatccctctaatgagactg

SEQ ID NO: 4531 - DNA, 25 bp, Homo sapiens
gagactgaccatattgtgcttcaca

SEQ ID NO: 4532 - DNA, 25 bp, Homo sapiens
gatccttagaggtcctctggagccc

SEQ ID NO: 4533 - DNA, 25 bp, Homo sapiens
ggcagcccagagactttgtagatcc

SEQ ID NO: 4534 - DNA, 25 bp, Homo sapiens
ggcctctctagcacaatttgcacta

SEQ ID NO: 4535 - DNA, 25 bp, Homo sapiens
ttacccacctagaacactaactcac

SEQ ID NO: 4536 - DNA, 25 bp, Homo sapiens
ttcagctccagggaatccaagcctc

SEQ ID NO: 4537 - DNA, 25 bp, Homo sapiens
aaagcccctgaattgttgtcaactt

SEQ ID NO: 4538 - DNA, 25 bp, Homo sapiens
aagatgcatctcgcataggctgcct

SEQ ID NO: 4539 - DNA, 25 bp, Homo sapiens
attgtcttgactactcaaagcccct

SEQ ID NO: 4540 - DNA, 25 bp, Homo sapiens
atttagcttgttgtctgatgcctcc

SEQ ID NO: 4541 - DNA, 25 bp, Homo sapiens
cacctccactccaacagagtgctga

SEQ ID NO: 4542 - DNA, 25 bp, Homo sapiens
gaagttgttcaactatccttgccac

SEQ ID NO: 4543 - DNA, 25 bp, Homo sapiens
gaccaaacaaggttttcactgcttt

SEQ ID NO: 4544 - DNA, 25 bp, Homo sapiens
gtaggacacctccgatggagctttg

SEQ ID NO: 4545 - DNA, 25 bp, Homo sapiens
gtgtagccctaacgtcatttagctt

SEQ ID NO: 4546 - DNA, 25 bp, Homo sapiens
tatgatgaaggaccgtgcacctcca

SEQ ID NO: 4547 - DNA, 25 bp, Homo sapiens
tgtctgatgcctccagtaggacacc

SEQ ID NO: 4548 - DNA, 25 bp, Homo sapiens
aaatctggactcactcctacaaggt

SEQ ID NO: 4549 - DNA, 25 bp, Homo sapiens
atgaaatctggactcactcctacaa

SEQ ID NO: 4550 - DNA, 25 bp, Homo sapiens
caatgaggaggtggcgaggttctat

SEQ ID NO: 4551 - DNA, 25 bp, Homo sapiens
ccactgttctgtgcaatgaaatctg

SEQ ID NO: 4552 - DNA, 25 bp, Homo sapiens
gactcactcctacaaggtcagcaac

SEQ ID NO: 4553 - DNA, 25 bp, Homo sapiens
gtgcaatgaaatctggactcactcc

SEQ ID NO: 4554 - DNA, 25 bp, Homo sapiens
tatgctgcagccatgagtggggctg

SEQ ID NO: 4555 - DNA, 25 bp, Homo sapiens
tctggactcactcctacaaggtcag

SEQ ID NO: 4556 - DNA, 25 bp, Homo sapiens
tggactcactcctacaaggtcagca

SEQ ID NO: 4557 - DNA, 25 bp, Homo sapiens
ttctgatacctggaaatccctgccc

SEQ ID NO: 4558 - DNA, 25 bp, Homo sapiens
tttaccttctgatacctggaaatcc

SEQ ID NO: 4559 - DNA, 25 bp, Homo sapiens
agaagctcaacacccagtgaggcgc

SEQ ID NO: 4560 - DNA, 25 bp, Homo sapiens
aggaggagatggagctctaccgcca

SEQ ID NO: 4561 - DNA, 25 bp, Homo sapiens
aggtgaaggccaaggtgcagcccta

SEQ ID NO: 4562 - DNA, 25 bp, Homo sapiens
caccgagcatctgagcacgctcagc

SEQ ID NO: 4563 - DNA, 25 bp, Homo sapiens
ctctaccgccagaaggtggagccgc

SEQ ID NO: 4564 - DNA, 25 bp, Homo sapiens
cttcctgagcgctctcgaggagtac

SEQ ID NO: 4565 - DNA, 25 bp, Homo sapiens
gagcccactgggcgaggagatgcgc

SEQ ID NO: 4566 - DNA, 25 bp, Homo sapiens
gagcttcaaggtcagcttcctgagc

SEQ ID NO: 4567 - DNA, 25 bp, Homo sapiens
gccctacctggacgacttccagaag

SEQ ID NO: 4568 - DNA, 25 bp, Homo sapiens
gcgcagagctccaagagggcgcgcg

SEQ ID NO: 4569 - DNA, 25 bp, Homo sapiens
ggccctgtgacccaggagttctggg

SEQ ID NO: 4570 - DNA, 25 bp, Homo sapiens
aaaattgcagcagtcccacagatgt

SEQ ID NO: 4571 - DNA, 25 bp, Homo sapiens
aggcttacatcttcccagagaacta

SEQ ID NO: 4572 - DNA, 25 bp, Homo sapiens
attgatttggacagctcaccaaccc

SEQ ID NO: 4573 - DNA, 25 bp, Homo sapiens
cacttcttttttcctatgcactggt

SEQ ID NO: 4574 - DNA, 25 bp, Homo sapiens
cccagctcctcaatactacctggaa

SEQ ID NO: 4575 - DNA, 25 bp, Homo sapiens
ctattggccaggcccctgttacaaa

SEQ ID NO: 4576 - DNA, 25 bp, Homo sapiens
ctgttacaaactgcgcagaccaccc

SEQ ID NO: 4577 - DNA, 25 bp, Homo sapiens
gactaccacctttcgagatcaggac

SEQ ID NO: 4578 - DNA, 25 bp, Homo sapiens
gccagagttggctatgccttttcag

SEQ ID NO: 4579 - DNA, 25 bp, Homo sapiens
gccgttcagcctggttagttttcta

SEQ ID NO: 4580 - DNA, 25 bp, Homo sapiens
taatctgaactgtgtcctgaacccc

SEQ ID NO: 4581 - DNA, 25 bp, Homo sapiens
agatataaattcgttcccacagcct

SEQ ID NO: 4582 - DNA, 25 bp, Homo sapiens
agtcttcgcacttgaaagctaacat

SEQ ID NO: 4583 - DNA, 25 bp, Homo sapiens
atgtttaccacaatgtcccatttct

SEQ ID NO: 4584 - DNA, 25 bp, Homo sapiens
catactctatttcttgagggctgca

SEQ ID NO: 4585 - DNA, 25 bp, Homo sapiens
gaaagagcacgtcatgaagcaccat

SEQ ID NO: 4586 - DNA, 25 bp, Homo sapiens
gttttgcctttttcgatatagtgac

SEQ ID NO: 4587 - DNA, 25 bp, Homo sapiens
tatagtgaccttctttgcatattaa

SEQ ID NO: 4588 - DNA, 25 bp, Homo sapiens
tatcggctacatatgcagtctgtga

SEQ ID NO: 4589 - DNA, 25 bp, Homo sapiens
tcagaactccccttcattgaatagt

SEQ ID NO: 4590 - DNA, 25 bp, Homo sapiens
tccaagttcacagtgtcatttcttc

SEQ ID NO: 4591 - DNA, 25 bp, Homo sapiens
tcccatttctagttaagtcttcgca

SEQ ID NO: 4592 - DNA, 25 bp, Homo sapiens
actgtgactgcgcgcaggacgagaa

SEQ ID NO: 4593 - DNA, 25 bp, Homo sapiens
atgccgcaccgtcattgaggacatg

SEQ ID NO: 4594 - DNA, 25 bp, Homo sapiens
cggcaaagtcttcaacgggctgcgc

SEQ ID NO: 4595 - DNA, 25 bp, Homo sapiens
cggtcaaggagaacatggcccgcct

SEQ ID NO: 4596 - DNA, 25 bp, Homo sapiens
gacgagaactgcaagtccaccaagc

SEQ ID NO: 4597 - DNA, 25 bp, Homo sapiens
gcaccgtcattgaggacatgctggc

SEQ ID NO: 4598 - DNA, 25 bp, Homo sapiens
gcccatctgcgagtcggtcaaggag

SEQ ID NO: 4599 - DNA, 25 bp, Homo sapiens
ggactacgatgacgagcagcgcacc

SEQ ID NO: 4600 - DNA, 25 bp, Homo sapiens
ggcctggacgactactacgatgagg

SEQ ID NO: 4601 - DNA, 25 bp, Homo sapiens
tacctgacctactgcggcaaagtct

SEQ ID NO: 4602 - DNA, 25 bp, Homo sapiens
tacgatgaggactacgatgacgagc

SEQ ID NO: 4603 - DNA, 25 bp, Homo sapiens
aatgcaggaagttcccaccttgact

SEQ ID NO: 4604 - DNA, 25 bp, Homo sapiens
actgcacttcgaatgtgttaccaag

SEQ ID NO: 4605 - DNA, 25 bp, Homo sapiens
atgtctcctgacaagccttatttca

SEQ ID NO: 4606 - DNA, 25 bp, Homo sapiens
caagatttccttactgaaaccctct

SEQ ID NO: 4607 - DNA, 25 bp, Homo sapiens
cagaggcttcctttcattacagtat

SEQ ID NO: 4608 - DNA, 25 bp, Homo sapiens
ccaccttgactatcccaaagattct

SEQ ID NO: 4609 - DNA, 25 bp, Homo sapiens
gactttgatttctgcagcaccaatg

SEQ ID NO: 4610 - DNA, 25 bp, Homo sapiens
gcagtcagaggggctccgtgaagca

SEQ ID NO: 4611 - DNA, 25 bp, Homo sapiens
gtcctacaaattaccatgtctcctg

SEQ ID NO: 4612 - DNA, 25 bp, Homo sapiens
ttatggttaccctttgatgctgttc

SEQ ID NO: 4613 - DNA, 25 bp, Homo sapiens
ttgtggaatattactgctgccctga

SEQ ID NO: 4614 - DNA, 25 bp, Homo sapiens
aaggctgatgcaggatttgttctct

SEQ ID NO: 4615 - DNA, 25 bp, Homo sapiens
accacttctggtcaatcaacactac

SEQ ID NO: 4616 - DNA, 25 bp, Homo sapiens
aggacatgatgcttttactgaactt

SEQ ID NO: 4617 - DNA, 25 bp, Homo sapiens
ccagagaaggggtgtgcatgcgcct

SEQ ID NO: 4618 - DNA, 25 bp, Homo sapiens
gaactttcttatcctagcacatgct

SEQ ID NO: 4619 - DNA, 25 bp, Homo sapiens
gcgcctactcgcttgctagaagtag

SEQ ID NO: 4620 - DNA, 25 bp, Homo sapiens
ggccagagctgaagagttgccccgt

SEQ ID NO: 4621 - DNA, 25 bp, Homo sapiens
gtggggtcctgccggagaggaagag

SEQ ID NO: 4622 - DNA, 25 bp, Homo sapiens
tcactctcctatgccttttacgagt

SEQ ID NO: 4623 - DNA, 25 bp, Homo sapiens
tcttcatctgcccaactgtgtagca

SEQ ID NO: 4624 - DNA, 25 bp, Homo sapiens
ttctggacagtcagctcttcatctg

SEQ ID NO: 4625 - DNA, 25 bp, Homo sapiens
acaagtgctcagttccaatgtgccc

SEQ ID NO: 4626 - DNA, 25 bp, Homo sapiens
agtgactaccacttatttctaaatc

SEQ ID NO: 4627 - DNA, 25 bp, Homo sapiens
atctgctgacagatgttccatcctg

SEQ ID NO: 4628 - DNA, 25 bp, Homo sapiens
attttgtggcttcaatctacgatgt

SEQ ID NO: 4629 - DNA, 25 bp, Homo sapiens
gaaatatctttgctcccagtttctt

SEQ ID NO: 4630 - DNA, 25 bp, Homo sapiens
gaagtcttccatcagcagtgattga

SEQ ID NO: 4631 - DNA, 25 bp, Homo sapiens
ggtagcagggtctttgtgtgctgtg

SEQ ID NO: 4632 - DNA, 25 bp, Homo sapiens
gttccatcctgtacaagtgctcagt

SEQ ID NO: 4633 - DNA, 25 bp, Homo sapiens
tacagtgtatctcgaagtcttccat

SEQ ID NO: 4634 - DNA, 25 bp, Homo sapiens
tgattgaagtatctgtacctgcccc

SEQ ID NO: 4635 - DNA, 25 bp, Homo sapiens
tgtgcccagtcatgacatttctcaa

SEQ ID NO: 4636 - DNA, 25 bp, Homo sapiens
actgccagaagtgtgttttggtatg

SEQ ID NO: 4637 - DNA, 25 bp, Homo sapiens
attccctgaagcaacactgccagaa

SEQ ID NO: 4638 - DNA, 25 bp, Homo sapiens
ctcccttcaatcctgtcaatgtttg

SEQ ID NO: 4639 - DNA, 25 bp, Homo sapiens
ctcggaattccctgaagcaacactg

SEQ ID NO: 4640 - DNA, 25 bp, Homo sapiens
ctggttccttaagtggctgtgatta

SEQ ID NO: 4641 - DNA, 25 bp, Homo sapiens
ggggaactgttgtttgatgtgtatg

SEQ ID NO: 4642 - DNA, 25 bp, Homo sapiens
gggtgttgaagaccccaactactat

SEQ ID NO: 4643 - DNA, 25 bp, Homo sapiens
gtctgatattggtgtgaatgctgta

SEQ ID NO: 4644 - DNA, 25 bp, Homo sapiens
gttttggtatgcactggttccttaa

SEQ ID NO: 4645 - DNA, 25 bp, Homo sapiens
tgaagaccccaactactattgtaga

SEQ ID NO: 4646 - DNA, 25 bp, Homo sapiens
tgtagagtggtctatttctcccttc

SEQ ID NO: 4647 - DNA, 25 bp, Homo sapiens
acaactgcagtattcacctaaagta

SEQ ID NO: 4648 - DNA, 25 bp, Homo sapiens
accagttttctgacattgtattgtg

SEQ ID NO: 4649 - DNA, 25 bp, Homo sapiens
atattcaacattttacaactgcagt

SEQ ID NO: 4650 - DNA, 25 bp, Homo sapiens
attgtattgtgttacctaagtcatt

SEQ ID NO: 4651 - DNA, 25 bp, Homo sapiens
ccctagtgtctccatggaccaaatt

SEQ ID NO: 4652 - DNA, 25 bp, Homo sapiens
gacgtagttcattagctggtcttac

SEQ ID NO: 4653 - DNA, 25 bp, Homo sapiens
gagaataacaccttaccaaacattg

SEQ ID NO: 4654 - DNA, 25 bp, Homo sapiens
gagtcaagttttctagttctgtgta

SEQ ID NO: 4655 - DNA, 25 bp, Homo sapiens
ggtcttactctaccagttttctgac

SEQ ID NO: 4656 - DNA, 25 bp, Homo sapiens
gtaaataaaacactcttccatatga

SEQ ID NO: 4657 - DNA, 25 bp, Homo sapiens
tgtaaatactgccctagtgtctcca

SEQ ID NO: 4658 - DNA, 25 bp, Homo sapiens
agtcaaacagtgtggcttaaacatt

SEQ ID NO: 4659 - DNA, 25 bp, Homo sapiens
ccaagttatttgatctggtgcgtgt

SEQ ID NO: 4660 - DNA, 25 bp, Homo sapiens
gaaattcttgcactgtatccaagtt

SEQ ID NO: 4661 - DNA, 25 bp, Homo sapiens
gatgattcaatcattttgggaaatt

SEQ ID NO: 4662 - DNA, 25 bp, Homo sapiens
gcactgtatccaagttatttgatct

SEQ ID NO: 4663 - DNA, 25 bp, Homo sapiens
gcaggaaagatcccaagtcaaacag

SEQ ID NO: 4664 - DNA, 25 bp, Homo sapiens
ggcaagtttttggtaatgatgattc

SEQ ID NO: 4665 - DNA, 25 bp, Homo sapiens
tctctctgttccaagtgtgtgtgca

SEQ ID NO: 4666 - DNA, 25 bp, Homo sapiens
tgttccaagtgtgtgtgcaatgttc

SEQ ID NO: 4667 - DNA, 25 bp, Homo sapiens
ttctctctgtgtggcaaacatttaa

SEQ ID NO: 4668 - DNA, 25 bp, Homo sapiens
ttgggaaattcttgcactgtatcca

SEQ ID NO: 4669 - DNA, 25 bp, Homo sapiens
agggtgaagctatttatctgtagta

SEQ ID NO: 4670 - DNA, 25 bp, Homo sapiens
cacatatgtattcctgatcgccaac

SEQ ID NO: 4671 - DNA, 25 bp, Homo sapiens
cagaccccctctagaaatttttcag

SEQ ID NO: 4672 - DNA, 25 bp, Homo sapiens
cagggttaatagggcctggtccctg

SEQ ID NO: 4673 - DNA, 25 bp, Homo sapiens
cttccatagcctaatccctgggcat

SEQ ID NO: 4674 - DNA, 25 bp, Homo sapiens
ggatggcttctaacaaaaactacac

SEQ ID NO: 4675 - DNA, 25 bp, Homo sapiens
gtgtgctatggatggcttctaacaa

SEQ ID NO: 4676 - DNA, 25 bp, Homo sapiens
tagttacacatcttcaacagacccc

SEQ ID NO: 4677 - DNA, 25 bp, Homo sapiens
ttaaaccctggatcagtcctttgat

SEQ ID NO: 4678 - DNA, 25 bp, Homo sapiens
ttagggcccaattaataatcagcaa

SEQ ID NO: 4679 - DNA, 25 bp, Homo sapiens
ttgaatgggtccattttgcccttcc

SEQ ID NO: 4680 - DNA, 25 bp, Homo sapiens
aacataaccattacagggagctggg

SEQ ID NO: 4681 - DNA, 25 bp, Homo sapiens
agaatggctgatcatcttggcatcc

SEQ ID NO: 4682 - DNA, 25 bp, Homo sapiens
agcacagacagaatccctgctacca

SEQ ID NO: 4683 - DNA, 25 bp, Homo sapiens
cctctggtcctataaggacacccca

SEQ ID NO: 4684 - DNA, 25 bp, Homo sapiens
ccttggctttgattcttgcagtttg

SEQ ID NO: 4685 - DNA, 25 bp, Homo sapiens
ctggatcaccgacagcacagacaga

SEQ ID NO: 4686 - DNA, 25 bp, Homo sapiens
gaatcagatggacactcacatggga

SEQ ID NO: 4687 - DNA, 25 bp, Homo sapiens
ggacaccccaaattccagaatggct

SEQ ID NO: 4688 - DNA, 25 bp, Homo sapiens
gggagctgggacacttaacagatgc

SEQ ID NO: 4689 - DNA, 25 bp, Homo sapiens
tgtaacacctacaccattatcttgg

SEQ ID NO: 4690 - DNA, 25 bp, Homo sapiens
tgtgctactgattgtttcattgcga

SEQ ID NO: 4691 - DNA, 25 bp, Homo sapiens
agaaggatttgacagaccccatctc

SEQ ID NO: 4692 - DNA, 25 bp, Homo sapiens
aggtaggatacgtacacctcttgcc

SEQ ID NO: 4693 - DNA, 25 bp, Homo sapiens
agtgcgtgtgttgggccaggtagga

SEQ ID NO: 4694 - DNA, 25 bp, Homo sapiens
atctccaaggaacggctgagctaca

SEQ ID NO: 4695 - DNA, 25 bp, Homo sapiens
cagaagggctggatgccccgggaga

SEQ ID NO: 4696 - DNA, 25 bp, Homo sapiens
cctcctctccgggatgatcagtgaa

SEQ ID NO: 4697 - DNA, 25 bp, Homo sapiens
ctcctgcaggacgagtccagctacg

SEQ ID NO: 4698 - DNA, 25 bp, Homo sapiens
gccagcggcactggaggggtaccgc

SEQ ID NO: 4699 - DNA, 25 bp, Homo sapiens
gctcatcgaccccaagaggacaggc

SEQ ID NO: 4700 - DNA, 25 bp, Homo sapiens
tctgtccaaccactgttttattatt

SEQ ID NO: 4701 - DNA, 25 bp, Homo sapiens
ttcgctgacacgggccaaggagcca

SEQ ID NO: 4702 - DNA, 25 bp, Homo sapiens
atgtctttgcaaatcctcacaggat

SEQ ID NO: 4703 - DNA, 25 bp, Homo sapiens
cacaggattcctgtgggtccagctt

SEQ ID NO: 4704 - DNA, 25 bp, Homo sapiens
ctgagaccagacaaagcccgggagg

SEQ ID NO: 4705 - DNA, 25 bp, Homo sapiens
gaaccaacactatcaatgtctttgc

SEQ ID NO: 4706 - DNA, 25 bp, Homo sapiens
gaccattgtacctggcacaagggct

SEQ ID NO: 4707 - DNA, 25 bp, Homo sapiens
gagacttactgggaggtgcaagaca

SEQ ID NO: 4708 - DNA, 25 bp, Homo sapiens
gccagtactgtggtgtgtgagtctc

SEQ ID NO: 4709 - DNA, 25 bp, Homo sapiens
gctcctaactctgctgcatggcaga

SEQ ID NO: 4710 - DNA, 25 bp, Homo sapiens
gctgcatggcagatgcctaggtgga

SEQ ID NO: 4711 - DNA, 25 bp, Homo sapiens
gggactgtctgtcaaaagactctgt

SEQ ID NO: 4712 - DNA, 25 bp, Homo sapiens
tgcaagacagtggcatttctcctct

SEQ ID NO: 4713 - DNA, 25 bp, Homo sapiens
aataatggtcagtcctcatctctgt

SEQ ID NO: 4714 - DNA, 25 bp, Homo sapiens
ataggtgccaccttgtgtgtttaaa

SEQ ID NO: 4715 - DNA, 25 bp, Homo sapiens
atgtgccatttttcagaggacgtgc

SEQ ID NO: 4716 - DNA, 25 bp, Homo sapiens
attaatcagccccagagtgctttaa

SEQ ID NO: 4717 - DNA, 25 bp, Homo sapiens
catggcctgtttgggagtgcgggat

SEQ ID NO: 4718 - DNA, 25 bp, Homo sapiens
ccctccggtgtctttgatcaggatg

SEQ ID NO: 4719 - DNA, 25 bp, Homo sapiens
ccgctgcccctactgcaaatggcag

SEQ ID NO: 4720 - DNA, 25 bp, Homo sapiens
gacgtgcagacaggctggcattcta

SEQ ID NO: 4721 - DNA, 25 bp, Homo sapiens
gattcaaaggtggtcccaccgctgc

SEQ ID NO: 4722 - DNA, 25 bp, Homo sapiens
tatttgaatatgtatcgtgccccct

SEQ ID NO: 4723 - DNA, 25 bp, Homo sapiens
ttaatcttatcttttggcttctgca

SEQ ID NO: 4724 - DNA, 25 bp, Homo sapiens
aaggtttaggcatcgcaaccgcaaa

SEQ ID NO: 4725 - DNA, 25 bp, Homo sapiens
cacggcgagtggacactgtggaccc

SEQ ID NO: 4726 - DNA, 25 bp, Homo sapiens
cagagtgtcttcttcttctctggag

SEQ ID NO: 4727 - DNA, 25 bp, Homo sapiens
cattagccgggactggcacggtgtg

SEQ ID NO: 4728 - DNA, 25 bp, Homo sapiens
ccagctcctggccatctgtaggagt

SEQ ID NO: 4729 - DNA, 25 bp, Homo sapiens
cgcaaaggctaccgttcacaacgag

SEQ ID NO: 4730 - DNA, 25 bp, Homo sapiens
ctgtaggagtcagagcccacatggc

SEQ ID NO: 4731 - DNA, 25 bp, Homo sapiens
ctgtccttgttctccagtgaggaga

SEQ ID NO: 4732 - DNA, 25 bp, Homo sapiens
cttctggggcagaacctctgctggt

SEQ ID NO: 4733 - DNA, 25 bp, Homo sapiens
gtgtgccagggcaagtggacgcagc

SEQ ID NO: 4734 - DNA, 25 bp, Homo sapiens
taccgagtcaatcttcgcacacggc

SEQ ID NO: 4735 - DNA, 25 bp, Homo sapiens
acctctctttagctcaatttctggg

SEQ ID NO: 4736 - DNA, 25 bp, Homo sapiens
agggctagacagctcagttcaccat

SEQ ID NO: 4737 - DNA, 25 bp, Homo sapiens
caagatcaaatctctcctggctgta

SEQ ID NO: 4738 - DNA, 25 bp, Homo sapiens
cagttcaccatgattctcttctgtc

SEQ ID NO: 4739 - DNA, 25 bp, Homo sapiens
catgccccaatgcttctatatgcta

SEQ ID NO: 4740 - DNA, 25 bp, Homo sapiens
ggagcttcatgatagccttgtgaca

SEQ ID NO: 4741 - DNA, 25 bp, Homo sapiens
gggactgtggatctcactggaagct

SEQ ID NO: 4742 - DNA, 25 bp, Homo sapiens
taaaccagtccactgttatacccgg

SEQ ID NO: 4743 - DNA, 25 bp, Homo sapiens
tgctggcacaccagtggcaaggccc

SEQ ID NO: 4744 - DNA, 25 bp, Homo sapiens
tggaagctatccaagagcccactgt

SEQ ID NO: 4745 - DNA, 25 bp, Homo sapiens
ttagggcaggattcttatccccatt

SEQ ID NO: 4746 - DNA, 25 bp, Homo sapiens
aaatatagtccaagctttctctgtg

SEQ ID NO: 4747 - DNA, 25 bp, Homo sapiens
agacatgtttccctattgctttcat

SEQ ID NO: 4748 - DNA, 25 bp, Homo sapiens
agatctccatctggtgacagtggga

SEQ ID NO: 4749 - DNA, 25 bp, Homo sapiens
cacagggcctgagaagtcttgcttt

SEQ ID NO: 4750 - DNA, 25 bp, Homo sapiens
cacgctcatcaggagaatccctact

SEQ ID NO: 4751 - DNA, 25 bp, Homo sapiens
gaagcctgcaagtctaagatctcca

SEQ ID NO: 4752 - DNA, 25 bp, Homo sapiens
gatgggtggggttcgtgtttagagt

SEQ ID NO: 4753 - DNA, 25 bp, Homo sapiens
gcagcaccccacagtgggtgccttc

SEQ ID NO: 4754 - DNA, 25 bp, Homo sapiens
gctgcacagcaacaccacagaacaa

SEQ ID NO: 4755 - DNA, 25 bp, Homo sapiens
gtgggggatgctaaccacagggcct

SEQ ID NO: 4756 - DNA, 25 bp, Homo sapiens
tgcgctggcagtacatgtgcacaaa

SEQ ID NO: 4757 - DNA, 25 bp, Homo sapiens
aacatagccaccattttgtccaagc

SEQ ID NO: 4758 - DNA, 25 bp, Homo sapiens
agtggtgcagcctagtgttggtgct

SEQ ID NO: 4759 - DNA, 25 bp, Homo sapiens
cccccggaaaacacgcacagtggtg

SEQ ID NO: 4760 - DNA, 25 bp, Homo sapiens
ctgcgccacaccttcatgggtgtgg

SEQ ID NO: 4761 - DNA, 25 bp, Homo sapiens
gacacttcaaggtctaggctagaca

SEQ ID NO: 4762 - DNA, 25 bp, Homo sapiens
gcaagtgtcacatgcgatctacatt

SEQ ID NO: 4763 - DNA, 25 bp, Homo sapiens
gcagagatgaggaggtttggcacag

SEQ ID NO: 4764 - DNA, 25 bp, Homo sapiens
gctggccacgcaagtgtcacatgcg

SEQ ID NO: 4765 - DNA, 25 bp, Homo sapiens
gtctaggctagacatggcagagatg

SEQ ID NO: 4766 - DNA, 25 bp, Homo sapiens
tccggggaggatcagacacttcaag

SEQ ID NO: 4767 - DNA, 25 bp, Homo sapiens
tctcattggggtcaccctcaggaga

SEQ ID NO: 4768 - DNA, 25 bp, Homo sapiens
acctgcccgctgtagatgagaaact

SEQ ID NO: 4769 - DNA, 25 bp, Homo sapiens
gagtaacagccagacacagccagac

SEQ ID NO: 4770 - DNA, 25 bp, Homo sapiens
gcaagatgagatgcctagcccgacc

SEQ ID NO: 4771 - DNA, 25 bp, Homo sapiens
gcacagcagccatgagcacttagac

SEQ ID NO: 4772 - DNA, 25 bp, Homo sapiens
ggacagcctgccagagtctggtctc

SEQ ID NO: 4773 - DNA, 25 bp, Homo sapiens
ggtgaaggaatctctctccagttac

SEQ ID NO: 4774 - DNA, 25 bp, Homo sapiens
gtctggtctctggacactatgggca

SEQ ID NO: 4775 - DNA, 25 bp, Homo sapiens
tactgaccaagttctttctgtgctg

SEQ ID NO: 4776 - DNA, 25 bp, Homo sapiens
tgcccgtccggagctggtgaggaca

SEQ ID NO: 4777 - DNA, 25 bp, Homo sapiens
tgtacgagaagacatacctgcccgc

SEQ ID NO: 4778 - DNA, 25 bp, Homo sapiens
tttcttgtcctcctggtattgggat

SEQ ID NO: 4779 - DNA, 25 bp, Homo sapiens
ataccagcaggaggttctgggcctc

SEQ ID NO: 4780 - DNA, 25 bp, Homo sapiens
caaatgtcagggttctgctcggctt

SEQ ID NO: 4781 - DNA, 25 bp, Homo sapiens
cagcgtcttgacgggagcattggcc

SEQ ID NO: 4782 - DNA, 25 bp, Homo sapiens
ccccagcgtcttgacgggagcattg

SEQ ID NO: 4783 - DNA, 25 bp, Homo sapiens
cttcttggaccatggcgcttagtcc

SEQ ID NO: 4784 - DNA, 25 bp, Homo sapiens
gaagcctgccgaaaacaggagcaaa

SEQ ID NO: 4785 - DNA, 25 bp, Homo sapiens
gatggcccaaatgtcagggttctgc

SEQ ID NO: 4786 - DNA, 25 bp, Homo sapiens
gctggaagcctgccgaaaacaggag

SEQ ID NO: 4787 - DNA, 25 bp, Homo sapiens
ggcccaaatgtcagggttctgctcg

SEQ ID NO: 4788 - DNA, 25 bp, Homo sapiens
taccagcaggaggttctgggcctct

SEQ ID NO: 4789 - DNA, 25 bp, Homo sapiens
ttcttggaccatggcgcttagtccc

SEQ ID NO: 4790 - DNA, 25 bp, Homo sapiens
actcactgcggagaaccttgtgcct

SEQ ID NO: 4791 - DNA, 25 bp, Homo sapiens
agtgaggcattgcacggggagacgt

SEQ ID NO: 4792 - DNA, 25 bp, Homo sapiens
cccactcacgaatattatgcccagt

SEQ ID NO: 4793 - DNA, 25 bp, Homo sapiens
cccagaaatcatctaaatacctgcc

SEQ ID NO: 4794 - DNA, 25 bp, Homo sapiens
gaagtagaaaggggcccagtcctgg

SEQ ID NO: 4795 - DNA, 25 bp, Homo sapiens
ggctcagagccagtctttttggtga

SEQ ID NO: 4796 - DNA, 25 bp, Homo sapiens
ggggagacgtacgtatcagcggccc

SEQ ID NO: 4797 - DNA, 25 bp, Homo sapiens
gggtttgagatggacacactggtgt

SEQ ID NO: 4798 - DNA, 25 bp, Homo sapiens
ggtgtggattaacctgccagggaga

SEQ ID NO: 4799 - DNA, 25 bp, Homo sapiens
tctgcctctgagggaaagcccagaa

SEQ ID NO: 4800 - DNA, 25 bp, Homo sapiens
tctggggactccgggtttgagatgg

SEQ ID NO: 4801 - DNA, 25 bp, Homo sapiens
ctggggaatactggccatgcctgga

SEQ ID NO: 4802 - DNA, 25 bp, Homo sapiens
gaagctggaggcacaacgcaccaga

SEQ ID NO: 4803 - DNA, 25 bp, Homo sapiens
gacactcacagcaaggatggagctg

SEQ ID NO: 4804 - DNA, 25 bp, Homo sapiens
gacatatcactcaatttctctgagg

SEQ ID NO: 4805 - DNA, 25 bp, Homo sapiens
gagtgacatgtgctggacactgtcc

SEQ ID NO: 4806 - DNA, 25 bp, Homo sapiens
gatggggtgtctgtgttatttgtgg

SEQ ID NO: 4807 - DNA, 25 bp, Homo sapiens
gctgaaaacataacccactctgtcc

SEQ ID NO: 4808 - DNA, 25 bp, Homo sapiens
ggacactgtccatgaagcactgagc

SEQ ID NO: 4809 - DNA, 25 bp, Homo sapiens
ggccatgcctggagacatatcactc

SEQ ID NO: 4810 - DNA, 25 bp, Homo sapiens
gggtgggatccacactgagagagtg

SEQ ID NO: 4811 - DNA, 25 bp, Homo sapiens
tggtgtaattttgtcctctctgtgt

SEQ ID NO: 4812 - DNA, 25 bp, Homo sapiens
aagcacctgctcgggtgattctggg

SEQ ID NO: 4813 - DNA, 25 bp, Homo sapiens
agaaacttcagtgtgtggacctcca

SEQ ID NO: 4814 - DNA, 25 bp, Homo sapiens
aggtgtgaggtccagggttgctagg

SEQ ID NO: 4815 - DNA, 25 bp, Homo sapiens
atgacgtgtgtgcgcaagttcaccc

SEQ ID NO: 4816 - DNA, 25 bp, Homo sapiens
gcttcaaggtatcacgtcatggggc

SEQ ID NO: 4817 - DNA, 25 bp, Homo sapiens
ggacctccatgttatttccaatgac

SEQ ID NO: 4818 - DNA, 25 bp, Homo sapiens
gtggatcaaggacaccatcgtggcc

SEQ ID NO: 4819 - DNA, 25 bp, Homo sapiens
gttctactgacctttgtccttaggt

SEQ ID NO: 4820 - DNA, 25 bp, Homo sapiens
tgaccaggccaagactcaagcctcc

SEQ ID NO: 4821 - DNA, 25 bp, Homo sapiens
tgtgaaggtcatggacctgcccacc

SEQ ID NO: 4822 - DNA, 25 bp, Homo sapiens
ttcatgctgtgtgctggacgctgga

SEQ ID NO: 4823 - DNA, 25 bp, Homo sapiens
aaaggtgctgcactgcctatttttc

SEQ ID NO: 4824 - DNA, 25 bp, Homo sapiens
aattctcagtgtggcacttacctgt

SEQ ID NO: 4825 - DNA, 25 bp, Homo sapiens
atggaactcccctgtgattgcagta

SEQ ID NO: 4826 - DNA, 25 bp, Homo sapiens
gagtctagaacgcaaggatctcttg

SEQ ID NO: 4827 - DNA, 25 bp, Homo sapiens
gcctatttttcctcttgttatgtaa

SEQ ID NO: 4828 - DNA, 25 bp, Homo sapiens
ggatatacaagttctgtggtttcag

SEQ ID NO: 4829 - DNA, 25 bp, Homo sapiens
taagcattccaataacaccttccaa

SEQ ID NO: 4830 - DNA, 25 bp, Homo sapiens
tatgaccttcatcaactcaatccta

SEQ ID NO: 4831 - DNA, 25 bp, Homo sapiens
ttaccccatttaattctagagtcta

SEQ ID NO: 4832 - DNA, 25 bp, Homo sapiens
ttgtttctttatggaactcccctgt

SEQ ID NO: 4833 - DNA, 25 bp, Homo sapiens
tttccctttaggctgtgatagtttt

SEQ ID NO: 4834 - DNA, 25 bp, Homo sapiens
aagccctggtgttgtgttttcatgt

SEQ ID NO: 4835 - DNA, 25 bp, Homo sapiens
atccctctggtcagtattatgaaat

SEQ ID NO: 4836 - DNA, 25 bp, Homo sapiens
ccctctcagatccaaatgttattat

SEQ ID NO: 4837 - DNA, 25 bp, Homo sapiens
ctccttgcaatcatgtggacaccaa

SEQ ID NO: 4838 - DNA, 25 bp, Homo sapiens
gaaagtaatctccttgcaatcatgt

SEQ ID NO: 4839 - DNA, 25 bp, Homo sapiens
gagaacttctcccacataatatata

SEQ ID NO: 4840 - DNA, 25 bp, Homo sapiens
ggaatcaaatttctcacaatgctgt

SEQ ID NO: 4841 - DNA, 25 bp, Homo sapiens
gtgttttaacatcgtgcttcttata

SEQ ID NO: 4842 - DNA, 25 bp, Homo sapiens
taatactgtgtttgatggcctctgc

SEQ ID NO: 4843 - DNA, 25 bp, Homo sapiens
ttggaggacaacttatcttcactaa

SEQ ID NO: 4844 - DNA, 25 bp, Homo sapiens
tttgtgagctgtgtaatccctctgg

SEQ ID NO: 4845 - DNA, 25 bp, Homo sapiens
aagcgtgctgcttctgcaaaagatt

SEQ ID NO: 4846 - DNA, 25 bp, Homo sapiens
agaataagtaggtaccctccatgcc

SEQ ID NO: 4847 - DNA, 25 bp, Homo sapiens
agattttccttactatcagtttatt

SEQ ID NO: 4848 - DNA, 25 bp, Homo sapiens
ataaatgcctttaattgttctcata

SEQ ID NO: 4849 - DNA, 25 bp, Homo sapiens
ctccatgcccttctgtaataaatat

SEQ ID NO: 4850 - DNA, 25 bp, Homo sapiens
gacaaccctattaatcatttggtct

SEQ ID NO: 4851 - DNA, 25 bp, Homo sapiens
gatgatctgttaatttcctatctaa

SEQ ID NO: 4852 - DNA, 25 bp, Homo sapiens
ggatcatgcccatttagattttcct

SEQ ID NO: 4853 - DNA, 25 bp, Homo sapiens
gtgtgcctcagaattgctatttcaa

SEQ ID NO: 4854 - DNA, 25 bp, Homo sapiens
tattgctcactgcctatttaatgta

SEQ ID NO: 4855 - DNA, 25 bp, Homo sapiens
ttcctcaccctaaaactaagcgtgc

SEQ ID NO: 4856 - DNA, 25 bp, Homo sapiens
aagttcatatctggagcctgatgtc

SEQ ID NO: 4857 - DNA, 25 bp, Homo sapiens
attgctgccaggcactgttcatctc

SEQ ID NO: 4858 - DNA, 25 bp, Homo sapiens
caaggacagggtggactgcggctac

SEQ ID NO: 4859 - DNA, 25 bp, Homo sapiens
cagaatgcaccttctgaggcacctc

SEQ ID NO: 4860 - DNA, 25 bp, Homo sapiens
cccaaggagtgcaacaaccggggct

SEQ ID NO: 4861 - DNA, 25 bp, Homo sapiens
ctgtgattgctgccaggcactgttc

SEQ ID NO: 4862 - DNA, 25 bp, Homo sapiens
gtttcaagcccctgactaggaagac

SEQ ID NO: 4863 - DNA, 25 bp, Homo sapiens
tccaggatccctggagtgccttggt

SEQ ID NO: 4864 - DNA, 25 bp, Homo sapiens
tcccggcaagctttctgctgaaagt

SEQ ID NO: 4865 - DNA, 25 bp, Homo sapiens
tgctgaggagtacgtgggcctgtct

SEQ ID NO: 4866 - DNA, 25 bp, Homo sapiens
tggagtgccttggtgtttcaagccc

SEQ ID NO: 4867 - DNA, 25 bp, Homo sapiens
aacaatccaacaccaatctagctaa

SEQ ID NO: 4868 - DNA, 25 bp, Homo sapiens
gaatattctcaggcttcaagatttg

SEQ ID NO: 4869 - DNA, 25 bp, Homo sapiens
gagtcccaggtgaacaaactgcggg

SEQ ID NO: 4870 - DNA, 25 bp, Homo sapiens
gagtgatcatgtcctgatgccatgg

SEQ ID NO: 4871 - DNA, 25 bp, Homo sapiens
gcaaaagcgtaatgctgaggctgtc

SEQ ID NO: 4872 - DNA, 25 bp, Homo sapiens
ggtctgcgcaaacatgagaggcgag

SEQ ID NO: 4873 - DNA, 25 bp, Homo sapiens
tattgtgtattctaccctgttgcaa

SEQ ID NO: 4874 - DNA, 25 bp, Homo sapiens
tctagctaaattccgcaagctccag

SEQ ID NO: 4875 - DNA, 25 bp, Homo sapiens
tgaggctgtcaaaggtctgcgcaaa

SEQ ID NO: 4876 - DNA, 25 bp, Homo sapiens
tgcgggtgaagagccgggaggttca

SEQ ID NO: 4877 - DNA, 25 bp, Homo sapiens
tggtcatttccctctgtaattattg

SEQ ID NO: 4878 - DNA, 25 bp, Homo sapiens
acctggccctcgaggacacaaggga

SEQ ID NO: 4879 - DNA, 25 bp, Homo sapiens
cttatggagccattcaaggaccccc

SEQ ID NO: 4880 - DNA, 25 bp, Homo sapiens
ggcatcagcaaggtcttctctgcct

SEQ ID NO: 4881 - DNA, 25 bp, Homo sapiens
gggtgtcagagagcatgcagcgtca

SEQ ID NO: 4882 - DNA, 25 bp, Homo sapiens
ggtgaccaagtctatgctgggcgga

SEQ ID NO: 4883 - DNA, 25 bp, Homo sapiens
gtgcaggcggtgcctttggtgaagc

SEQ ID NO: 4884 - DNA, 25 bp, Homo sapiens
tacagcaacgtgactgcggacctca

SEQ ID NO: 4885 - DNA, 25 bp, Homo sapiens
tgcaagggatggcctacactgtcca

SEQ ID NO: 4886 - DNA, 25 bp, Homo sapiens
tgcagcgtcagggcctactgcaagg

SEQ ID NO: 4887 - DNA, 25 bp, Homo sapiens
tgctgtcaagccgtgagctagccat

SEQ ID NO: 4888 - DNA, 25 bp, Homo sapiens
tggcaggacagctcctggaccaggt

SEQ ID NO: 4889 - DNA, 25 bp, Homo sapiens
cactgtcctcccttaaaagcatcat

SEQ ID NO: 4890 - DNA, 25 bp, Homo sapiens
ctgtattttcactggccatattgga

SEQ ID NO: 4891 - DNA, 25 bp, Homo sapiens
gaacttcaaacatttgggaccacct

SEQ ID NO: 4892 - DNA, 25 bp, Homo sapiens
gaatcttccctattagttcttcatg

SEQ ID NO: 4893 - DNA, 25 bp, Homo sapiens
gaatttagccctgttgtagcatgtt

SEQ ID NO: 4894 - DNA, 25 bp, Homo sapiens
gaccacctggtattctgtattttca

SEQ ID NO: 4895 - DNA, 25 bp, Homo sapiens
gagttgtgctggcagtagtttccat

SEQ ID NO: 4896 - DNA, 25 bp, Homo sapiens
ggttagggaattttcctctctctct

SEQ ID NO: 4897 - DNA, 25 bp, Homo sapiens
ggtttgataacccttctatgtattg

SEQ ID NO: 4898 - DNA, 25 bp, Homo sapiens
gtagtttccatgcctgtcaatgtat

SEQ ID NO: 4899 - DNA, 25 bp, Homo sapiens
tgtatcatagtcctttgttgcccag

SEQ ID NO: 4900 - DNA, 25 bp, Homo sapiens
aaaacatgctcctggctacaaaaca

SEQ ID NO: 4901 - DNA, 25 bp, Homo sapiens
acaaaatgtacctcagcaacaaccc

SEQ ID NO: 4902 - DNA, 25 bp, Homo sapiens
acaagaaaaaacatgctcctggcta

SEQ ID NO: 4903 - DNA, 25 bp, Homo sapiens
atgcaaagagttcaccgacctgctg

SEQ ID NO: 4904 - DNA, 25 bp, Homo sapiens
attccgatcccaatgagcaagtgac

SEQ ID NO: 4905 - DNA, 25 bp, Homo sapiens
ccacacggacaacaacgccaaaagc

SEQ ID NO: 4906 - DNA, 25 bp, Homo sapiens
ccctctcgactgtcagtggggcagc

SEQ ID NO: 4907 - DNA, 25 bp, Homo sapiens
gatatgcaaagagttcaccgacctg

SEQ ID NO: 4908 - DNA, 25 bp, Homo sapiens
gatcccaatgagcaagtgacaagaa

SEQ ID NO: 4909 - DNA, 25 bp, Homo sapiens
gctcctggctacaaaacagatatgc

SEQ ID NO: 4910 - DNA, 25 bp, Homo sapiens
ggacaacaacgccaaaagcagtgac

SEQ ID NO: 4911 - DNA, 25 bp, Homo sapiens
acagccacgaagatcctaccaaaat

SEQ ID NO: 4912 - DNA, 25 bp, Homo sapiens
agttgaggtgacacgtctcagcctt

SEQ ID NO: 4913 - DNA, 25 bp, Homo sapiens
catcagcctcctggttatggtacag

SEQ ID NO: 4914 - DNA, 25 bp, Homo sapiens
ccaaaatgaagcgcttcctcttcct

SEQ ID NO: 4915 - DNA, 25 bp, Homo sapiens
gactctcaggacaaaacgacaccag

SEQ ID NO: 4916 - DNA, 25 bp, Homo sapiens
gcatccagcagcatgagcggaggca

SEQ ID NO: 4917 - DNA, 25 bp, Homo sapiens
gccaccatcactcgcaagagaatcc

SEQ ID NO: 4918 - DNA, 25 bp, Homo sapiens
gggggtaatgatgtaggggccaagc

SEQ ID NO: 4919 - DNA, 25 bp, Homo sapiens
ggtacagatacaaactggactctca

SEQ ID NO: 4920 - DNA, 25 bp, Homo sapiens
gtggccaatgccataatccacctct

SEQ ID NO: 4921 - DNA, 25 bp, Homo sapiens
ttgggaggggttgatgccagacatc

SEQ ID NO: 4922 - DNA, 25 bp, Homo sapiens
agaactcgcttctttgctttgagag

SEQ ID NO: 4923 - DNA, 25 bp, Homo sapiens
agatggccctgggaacaatcctcag

SEQ ID NO: 4924 - DNA, 25 bp, Homo sapiens
agccagagggtttcattattatttc

SEQ ID NO: 4925 - DNA, 25 bp, Homo sapiens
caggaattgccctcaagaactcgct

SEQ ID NO: 4926 - DNA, 25 bp, Homo sapiens
cagtgttatgcactttccacagttg

SEQ ID NO: 4927 - DNA, 25 bp, Homo sapiens
catggtcatgtcattctgaggtaca

SEQ ID NO: 4928 - DNA, 25 bp, Homo sapiens
gctttgagagtgccatggtcatgtc

SEQ ID NO: 4929 - DNA, 25 bp, Homo sapiens
gggagctggatttcaaacggtggtc

SEQ ID NO: 4930 - DNA, 25 bp, Homo sapiens
gtgcttgtttcatccagtgttatgc

SEQ ID NO: 4931 - DNA, 25 bp, Homo sapiens
taataccagattttaagccgcggaa

SEQ ID NO: 4932 - DNA, 25 bp, Homo sapiens
taatcattgccatcgtgtgcttgtt

SEQ ID NO: 4933 - DNA, 25 bp, Homo sapiens
aaaccagccagcgtgaggtggtcct

SEQ ID NO: 4934 - DNA, 25 bp, Homo sapiens
aatggatgctgcaagacctgcaccc

SEQ ID NO: 4935 - DNA, 25 bp, Homo sapiens
atcacattcatgcccaatggatgct

SEQ ID NO: 4936 - DNA, 25 bp, Homo sapiens
caccaagaccgtcctcatgaatcat

SEQ ID NO: 4937 - DNA, 25 bp, Homo sapiens
catttgtcatgtactcggccaaggc

SEQ ID NO: 4938 - DNA, 25 bp, Homo sapiens
ccagcgtgaggtggtcctgagctgc

SEQ ID NO: 4939 - DNA, 25 bp, Homo sapiens
cgggtcctgcgggacatttgtcatg

SEQ ID NO: 4940 - DNA, 25 bp, Homo sapiens
gcacccctcgcaatgagaccagggt

SEQ ID NO: 4941 - DNA, 25 bp, Homo sapiens
tcgcaatgagaccagggtgccctgc

SEQ ID NO: 4942 - DNA, 25 bp, Homo sapiens
tgtctgagtctttgttcagtccttg

SEQ ID NO: 4943 - DNA, 25 bp, Homo sapiens
ttgatgccagcatttgcatcccggg

SEQ ID NO: 4944 - DNA, 25 bp, Homo sapiens
aaccttctgtgaactccatgagctg

SEQ ID NO: 4945 - DNA, 25 bp, Homo sapiens
attgggatcacgtgttacctgctac

SEQ ID NO: 4946 - DNA, 25 bp, Homo sapiens
gaggatcaggtgcacatcatagagc

SEQ ID NO: 4947 - DNA, 25 bp, Homo sapiens
gcaccattggcctgggggattatgt

SEQ ID NO: 4948 - DNA, 25 bp, Homo sapiens
ggacaaggacgaggatcaggtgcac

SEQ ID NO: 4949 - DNA, 25 bp, Homo sapiens
ggccttattgccatgttggtagttc

SEQ ID NO: 4950 - DNA, 25 bp, Homo sapiens
gggggattatgtgcctggggaaggc

SEQ ID NO: 4951 - DNA, 25 bp, Homo sapiens
ggtagttctggaaaccttctgtgaa

SEQ ID NO: 4952 - DNA, 25 bp, Homo sapiens
gtcttctcagtcctggaggatgact

SEQ ID NO: 4953 - DNA, 25 bp, Homo sapiens
tacctgctacttggccttattgcca

SEQ ID NO: 4954 - DNA, 25 bp, Homo sapiens
tagagcatgaccaactgtccttctc

SEQ ID NO: 4955 - DNA, 25 bp, Homo sapiens
cagcgcaaaccgcagaccagaggac

SEQ ID NO: 4956 - DNA, 25 bp, Homo sapiens
cctcccgggaggacagccttgaggc

SEQ ID NO: 4957 - DNA, 25 bp, Homo sapiens
cctgccctggaacatcctttgcagg

SEQ ID NO: 4958 - DNA, 25 bp, Homo sapiens
ccttggcaggtcctggccagatggc

SEQ ID NO: 4959 - DNA, 25 bp, Homo sapiens
ctgcttccggtagggaggcagcctc

SEQ ID NO: 4960 - DNA, 25 bp, Homo sapiens
gaactcctgactgtaacatattctg

SEQ ID NO: 4961 - DNA, 25 bp, Homo sapiens
gattccttctctgaacacaggcagc

SEQ ID NO: 4962 - DNA, 25 bp, Homo sapiens
gcagccccacaactttaaacattga

SEQ ID NO: 4963 - DNA, 25 bp, Homo sapiens
ggcacaactgcaataacttctgacc

SEQ ID NO: 4964 - DNA, 25 bp, Homo sapiens
taaacattgacgattccttctctga

SEQ ID NO: 4965 - DNA, 25 bp, Homo sapiens
tccgaggctaccccgaggagaagaa

SEQ ID NO: 4966 - DNA, 25 bp, Homo sapiens
acgtctactttcacttggtgctgga

SEQ ID NO: 4967 - DNA, 25 bp, Homo sapiens
atcctctacagccagatgtcacagg

SEQ ID NO: 4968 - DNA, 25 bp, Homo sapiens
ccccagaatgcctcacgtgcttggg

SEQ ID NO: 4969 - DNA, 25 bp, Homo sapiens
ccctcttgccaacaagcctggaaag

SEQ ID NO: 4970 - DNA, 25 bp, Homo sapiens
cctagccaagacactggttctcctt

SEQ ID NO: 4971 - DNA, 25 bp, Homo sapiens
ctaagccaagacactggttctcctt

SEQ ID NO: 4972 - DNA, 25 bp, Homo sapiens
cttggggagaaagcacccctcttgc

SEQ ID NO: 4973 - DNA, 25 bp, Homo sapiens
gaccttcctagccaagacactggtt

SEQ ID NO: 4974 - DNA, 25 bp, Homo sapiens
gcagcaaagcacaggttctcctgga

SEQ ID NO: 4975 - DNA, 25 bp, Homo sapiens
gtcacagggatacgtctactttcac

SEQ ID NO: 4976 - DNA, 25 bp, Homo sapiens
tgggagatggcatttggcttctgag

SEQ ID NO: 4977 - DNA, 25 bp, Homo sapiens
aaagagctataccatccactacagt

SEQ ID NO: 4978 - DNA, 25 bp, Homo sapiens
aaagtattgcacttcgcctggaact

SEQ ID NO: 4979 - DNA, 25 bp, Homo sapiens
aactctttggctgtgatatttacta

SEQ ID NO: 4980 - DNA, 25 bp, Homo sapiens
agactctttaagacctcaaaccatt

SEQ ID NO: 4981 - DNA, 25 bp, Homo sapiens
gaatgcccagggacgtgtgaatgcc

SEQ ID NO: 4982 - DNA, 25 bp, Homo sapiens
gcaaatcacagcttcttcgtttaag

SEQ ID NO: 4983 - DNA, 25 bp, Homo sapiens
gctgaaatcctccatggtggacaag

SEQ ID NO: 4984 - DNA, 25 bp, Homo sapiens
gggacgtgtgaatgcctggcaagcc

SEQ ID NO: 4985 - DNA, 25 bp, Homo sapiens
gggcaatgtattttacgctgtgtta

SEQ ID NO: 4986 - DNA, 25 bp, Homo sapiens
tataacacagggctgcaagtctctg

SEQ ID NO: 4987 - DNA, 25 bp, Homo sapiens
tttccaggtttatccgtgtcattcc

SEQ ID NO: 4988 - DNA, 25 bp, Homo sapiens
agcctgccaaggagccgtgttagga

SEQ ID NO: 4989 - DNA, 25 bp, Homo sapiens
caccagcaaggacggccaggacggt

SEQ ID NO: 4990 - DNA, 25 bp, Homo sapiens
gaaatcaggctctcgaagctcataa

SEQ ID NO: 4991 - DNA, 25 bp, Homo sapiens
gaagcaagtgacaaggacgcccgaa

SEQ ID NO: 4992 - DNA, 25 bp, Homo sapiens
gacgcccgaagcacagtggacggtc

SEQ ID NO: 4993 - DNA, 25 bp, Homo sapiens
gcatacctcaaaaggccctagctaa

SEQ ID NO: 4994 - DNA, 25 bp, Homo sapiens
ggacggtcatgaaggagcgggggtg

SEQ ID NO: 4995 - DNA, 25 bp, Homo sapiens
ggctgtcgcctgacagcatacctca

SEQ ID NO: 4996 - DNA, 25 bp, Homo sapiens
ggttgtgtacaactccacgaggtga

SEQ ID NO: 4997 - DNA, 25 bp, Homo sapiens
gtccaggagagggagcgcccctggc

SEQ ID NO: 4998 - DNA, 25 bp, Homo sapiens
taaagactatgatctcatcccaata

SEQ ID NO: 4999 - DNA, 25 bp, Homo sapiens
aaatgttgggtccagtcgtgcttga

SEQ ID NO: 5000 - DNA, 25 bp, Homo sapiens
aggggatttcctcattcgtgatagt

SEQ ID NO: 5001 - DNA, 25 bp, Homo sapiens
atttatcatgatactgctgaccaga

SEQ ID NO: 5002 - DNA, 25 bp, Homo sapiens
ctggcaatccttggtattatggcaa

SEQ ID NO: 5003 - DNA, 25 bp, Homo sapiens
gaaccatcacctccacagtgtgatt

SEQ ID NO: 5004 - DNA, 25 bp, Homo sapiens
gaatcttcgccaaatgatttctcag

SEQ ID NO: 5005 - DNA, 25 bp, Homo sapiens
gctgtgtagctgtaatttgtcatgt

SEQ ID NO: 5006 - DNA, 25 bp, Homo sapiens
ggcaaagtcaccaggcatcaagcag

SEQ ID NO: 5007 - DNA, 25 bp, Homo sapiens
ggcagcgtaaattcagcaccatgga

SEQ ID NO: 5008 - DNA, 25 bp, Homo sapiens
ggccttcactcactggaaagtttgc

SEQ ID NO: 5009 - DNA, 25 bp, Homo sapiens
tgattacattaggccttcactcact

SEQ ID NO: 5010 - DNA, 25 bp, Homo sapiens
aaaaccattcaggccaagtgaccct

SEQ ID NO: 5011 - DNA, 25 bp, Homo sapiens
aacgcagcgacgtgagggtcctgat

SEQ ID NO: 5012 - DNA, 25 bp, Homo sapiens
aagtgaccctgacatgtgacatcta

SEQ ID NO: 5013 - DNA, 25 bp, Homo sapiens
aggaaaatcccttctaggcatctcc

SEQ ID NO: 5014 - DNA, 25 bp, Homo sapiens
cagctctgaccctgatgcttaataa

SEQ ID NO: 5015 - DNA, 25 bp, Homo sapiens
gatacagtctccatcaggcagtggc

SEQ ID NO: 5016 - DNA, 25 bp, Homo sapiens
gtctacaccaacgtctgcagataca

SEQ ID NO: 5017 - DNA, 25 bp, Homo sapiens
tccatccttgcatcactggggagga

SEQ ID NO: 5018 - DNA, 25 bp, Homo sapiens
tgaggacttgggtcctcggtcttac

SEQ ID NO: 5019 - DNA, 25 bp, Homo sapiens
tgtacctttcttcactgcagatttc

SEQ ID NO: 5020 - DNA, 25 bp, Homo sapiens
ttacccccaccactaagagaataca

SEQ ID NO: 5021 - DNA, 25 bp, Homo sapiens
ctcggtcttttatttcagggctttg

SEQ ID NO: 5022 - DNA, 25 bp, Homo sapiens
gatggacaggtggtttcttcccaca

SEQ ID NO: 5023 - DNA, 25 bp, Homo sapiens
gatggaggctcagaaccaggagtac

SEQ ID NO: 5024 - DNA, 25 bp, Homo sapiens
gctgagtgagctccgatgcgagatg

SEQ ID NO: 5025 - DNA, 25 bp, Homo sapiens
gctgcttgacataaagacacggctg

SEQ ID NO: 5026 - DNA, 25 bp, Homo sapiens
ggaagcctcttcaggaggtggtggt

SEQ ID NO: 5027 - DNA, 25 bp, Homo sapiens
ggagatgcagctgtattgtgtaaca

SEQ ID NO: 5028 - DNA, 25 bp, Homo sapiens
ggagcaggagatcgctacttaccgc

SEQ ID NO: 5029 - DNA, 25 bp, Homo sapiens
ggcattggcatcagggaagcctctt

SEQ ID NO: 5030 - DNA, 25 bp, Homo sapiens
gtagcagcagcaatttccacatcaa

SEQ ID NO: 5031 - DNA, 25 bp, Homo sapiens
tggccgagacagagtgccgctatgc

SEQ ID NO: 5032 - DNA, 25 bp, Homo sapiens
aacatggtgctgagctagccaggac

SEQ ID NO: 5033 - DNA, 25 bp, Homo sapiens
atatattcagggtgcagggtgggta

SEQ ID NO: 5034 - DNA, 25 bp, Homo sapiens
ccagggccccatcttgatgggccaa

SEQ ID NO: 5035 - DNA, 25 bp, Homo sapiens
gagcgcctccagtctagaaggcata

SEQ ID NO: 5036 - DNA, 25 bp, Homo sapiens
gctaaacatgcatgtgtcagtggct

SEQ ID NO: 5037 - DNA, 25 bp, Homo sapiens
gggccaagggctaaacatgcatgtg

SEQ ID NO: 5038 - DNA, 25 bp, Homo sapiens
gggtttatttaagggagattgcaag

SEQ ID NO: 5039 - DNA, 25 bp, Homo sapiens
ggtgctgagctagccaggactgatg

SEQ ID NO: 5040 - DNA, 25 bp, Homo sapiens
ggttgctctggggatgggtttattt

SEQ ID NO: 5041 - DNA, 25 bp, Homo sapiens
gtgcagggtgggtaggttgctctgg

SEQ ID NO: 5042 - DNA, 25 bp, Homo sapiens
tgcaaggaagctatttaacatggtg

SEQ ID NO: 5043 - DNA, 25 bp, Homo sapiens
aattcccgtggggatcgcacagtgc

SEQ ID NO: 5044 - DNA, 25 bp, Homo sapiens
attgctcacaggctgcaggcagttc

SEQ ID NO: 5045 - DNA, 25 bp, Homo sapiens
cagagctgttcctgctttgagtttc

SEQ ID NO: 5046 - DNA, 25 bp, Homo sapiens
cccaccagatcctggtgctccagga

SEQ ID NO: 5047 - DNA, 25 bp, Homo sapiens
ccctgcaggactggaattcccgtgg

SEQ ID NO: 5048 - DNA, 25 bp, Homo sapiens
cgcacagtgctggtgattgctcaca

SEQ ID NO: 5049 - DNA, 25 bp, Homo sapiens
cggccagatagctgttcctgagttg

SEQ ID NO: 5050 - DNA, 25 bp, Homo sapiens
gaaacttaattccctggtgactaga

SEQ ID NO: 5051 - DNA, 25 bp, Homo sapiens
ggtgactagagctttgcctggtgat

SEQ ID NO: 5052 - DNA, 25 bp, Homo sapiens
ttgcccagctccaggagggacagga

SEQ ID NO: 5053 - DNA, 25 bp, Homo sapiens
tttgagtttccctagagctgtgcgg

SEQ ID NO: 5054 - DNA, 25 bp, Homo sapiens
aagacaggtccaggggagcatctcc

SEQ ID NO: 5055 - DNA, 25 bp, Homo sapiens
aatgcgtggaggccgacttggcgtt

SEQ ID NO: 5056 - DNA, 25 bp, Homo sapiens
aggacaaggtgtcctaccgctggtt

SEQ ID NO: 5057 - DNA, 25 bp, Homo sapiens
ccccattccgagcagttgcagaacc

SEQ ID NO: 5058 - DNA, 25 bp, Homo sapiens
ctgagttggtggctgactctggcgt

SEQ ID NO: 5059 - DNA, 25 bp, Homo sapiens
gaaaacatcatctggtccaacctca

SEQ ID NO: 5060 - DNA, 25 bp, Homo sapiens
gacatattggcaagccaccccattc

SEQ ID NO: 5061 - DNA, 25 bp, Homo sapiens
tcaaacccagaatttcgaccgcttc

SEQ ID NO: 5062 - DNA, 25 bp, Homo sapiens
tccaacctcaagtatcgctgcaatg

SEQ ID NO: 5063 - DNA, 25 bp, Homo sapiens
tgaccaggtcaggctgctgtggaag

SEQ ID NO: 5064 - DNA, 25 bp, Homo sapiens
tggcgtcaccatagacaccacaatg

SEQ ID NO: 5065 - DNA, 25 bp, Homo sapiens
agatctttccagaggtccatggtgg

SEQ ID NO: 5066 - DNA, 25 bp, Homo sapiens
ccagatggtgttaactggccgcccc

SEQ ID NO: 5067 - DNA, 25 bp, Homo sapiens
ccccatcttgtgccatgttttaagt

SEQ ID NO: 5068 - DNA, 25 bp, Homo sapiens
cctggagcagctctcgagaactacc

SEQ ID NO: 5069 - DNA, 25 bp, Homo sapiens
ctaaaactcacccaacagatctttc

SEQ ID NO: 5070 - DNA, 25 bp, Homo sapiens
gctctcgagaactacctgttggtat

SEQ ID NO: 5071 - DNA, 25 bp, Homo sapiens
ggaagtcttcataaagccgcagtag

SEQ ID NO: 5072 - DNA, 25 bp, Homo sapiens
tagggtcacctcctgtttgtgaaag

SEQ ID NO: 5073 - DNA, 25 bp, Homo sapiens
tgtgaaaggggaccttcttgttcgg

SEQ ID NO: 5074 - DNA, 25 bp, Homo sapiens
tgttggtattgtccacaagctctcc

SEQ ID NO: 5075 - DNA, 25 bp, Homo sapiens
ttgggagcttgctgtgtctaacctc

SEQ ID NO: 5076 - DNA, 25 bp, Homo sapiens
agagttccaaccaatgggctccatc

SEQ ID NO: 5077 - DNA, 25 bp, Homo sapiens
atgaaatatctccctggcagggtcc

SEQ ID NO: 5078 - DNA, 25 bp, Homo sapiens
atttgacgtgtccaacgctgatcgg

SEQ ID NO: 5079 - DNA, 25 bp, Homo sapiens
cagctgccgtgggctcagtatttga

SEQ ID NO: 5080 - DNA, 25 bp, Homo sapiens
cccaagttcgaggagatcctcaccc

SEQ ID NO: 5081 - DNA, 25 bp, Homo sapiens
ccccaaccaggagctctagttaatg

SEQ ID NO: 5082 - DNA, 25 bp, Homo sapiens
gattctggccaatgaaatatctccc

SEQ ID NO: 5083 - DNA, 25 bp, Homo sapiens
gcaagcaccccaagttcgaggagat

SEQ ID NO: 5084 - DNA, 25 bp, Homo sapiens
ggatggtgtgaagctcatggtggaa

SEQ ID NO: 5085 - DNA, 25 bp, Homo sapiens
gggctcagtatttgacgtgtccaac

SEQ ID NO: 5086 - DNA, 25 bp, Homo sapiens
tcaaccagagttccaaccaatgggc

SEQ ID NO: 5087 - DNA, 25 bp, Homo sapiens
aaatatcgtgtgtgtgattccttgt

SEQ ID NO: 5088 - DNA, 25 bp, Homo sapiens
aacagacaaaacaatccccatcagg

SEQ ID NO: 5089 - DNA, 25 bp, Homo sapiens
aatgtcatgttgcttgtcgctttct

SEQ ID NO: 5090 - DNA, 25 bp, Homo sapiens
ctgggtctaatccttctcattaccc

SEQ ID NO: 5091 - DNA, 25 bp, Homo sapiens
gatggggctcagatggactgggagg

SEQ ID NO: 5092 - DNA, 25 bp, Homo sapiens
gggcgtgcgtgtaactgtagtgtag

SEQ ID NO: 5093 - DNA, 25 bp, Homo sapiens
ggggaactgagggcaaggggatata

SEQ ID NO: 5094 - DNA, 25 bp, Homo sapiens
gtagtgtagtcaggtgctcaatgga

SEQ ID NO: 5095 - DNA, 25 bp, Homo sapiens
tccccatcaggtagctgtctaaccc

SEQ ID NO: 5096 - DNA, 25 bp, Homo sapiens
tctaacccccagctgggtctaatcc

SEQ ID NO: 5097 - DNA, 25 bp, Homo sapiens
tgccagggtgggtgtccatgtgcac

SEQ ID NO: 5098 - DNA, 25 bp, Homo sapiens
aaaggctggcatcttatggctcatc

SEQ ID NO: 5099 - DNA, 25 bp, Homo sapiens
agcacagcggaatttcctcctattg

SEQ ID NO: 5100 - DNA, 25 bp, Homo sapiens
atcttggcgaagagcccttttgcct

SEQ ID NO: 5101 - DNA, 25 bp, Homo sapiens
ccttttgcctattacacgccaggga

SEQ ID NO: 5102 - DNA, 25 bp, Homo sapiens
cttgctcactatttgcctattggca

SEQ ID NO: 5103 - DNA, 25 bp, Homo sapiens
gaaaggcgcttacttgtggatctgc

SEQ ID NO: 5104 - DNA, 25 bp, Homo sapiens
gacatccagcatgctatcttggcga

SEQ ID NO: 5105 - DNA, 25 bp, Homo sapiens
gatcaactcgttagccagcaaggac

SEQ ID NO: 5106 - DNA, 25 bp, Homo sapiens
ggaagactacggccaggactacatc

SEQ ID NO: 5107 - DNA, 25 bp, Homo sapiens
taaagttgcttccatccaacctgga

SEQ ID NO: 5108 - DNA, 25 bp, Homo sapiens
tggaggcttcctaacaaatatcgca

SEQ ID NO: 5109 - DNA, 25 bp, Homo sapiens
aaagagggcgtcttcttagtcctct

SEQ ID NO: 5110 - DNA, 25 bp, Homo sapiens
aaaggactgatttgatgcctctccc

SEQ ID NO: 5111 - DNA, 25 bp, Homo sapiens
atgcctaatctgtaatcacatttct

SEQ ID NO: 5112 - DNA, 25 bp, Homo sapiens
gagggagtcgaagctgatggttgga

SEQ ID NO: 5113 - DNA, 25 bp, Homo sapiens
gcctctccccagagcatttgataag

SEQ ID NO: 5114 - DNA, 25 bp, Homo sapiens
gggagccattttgtgttttgcgtag

SEQ ID NO: 5115 - DNA, 25 bp, Homo sapiens
gtcatagaggctatcctggagactt

SEQ ID NO: 5116 - DNA, 25 bp, Homo sapiens
tataccctgaagaactctttttcct

SEQ ID NO: 5117 - DNA, 25 bp, Homo sapiens
tctttttcctctaatatgcctaatc

SEQ ID NO: 5118 - DNA, 25 bp, Homo sapiens
ttccacatgtgccagttgcctggat

SEQ ID NO: 5119 - DNA, 25 bp, Homo sapiens
ttgctttggtattctgcttccacat

SEQ ID NO: 5120 - DNA, 25 bp, Homo sapiens
acttaatatactcagggattccttc

SEQ ID NO: 5121 - DNA, 25 bp, Homo sapiens
atggctgactgttgcctttactctt

SEQ ID NO: 5122 - DNA, 25 bp, Homo sapiens
caataagagaactctcctctttttt

SEQ ID NO: 5123 - DNA, 25 bp, Homo sapiens
ctaagcactgtgtttatatgtcttg

SEQ ID NO: 5124 - DNA, 25 bp, Homo sapiens
gaaacaccacttaatcttctctctt

SEQ ID NO: 5125 - DNA, 25 bp, Homo sapiens
gcaaagcctttaaattgttcctctt

SEQ ID NO: 5126 - DNA, 25 bp, Homo sapiens
gggattccttctaagtgtacttcat

SEQ ID NO: 5127 - DNA, 25 bp, Homo sapiens
taaataccagtacttgagggaccaa

SEQ ID NO: 5128 - DNA, 25 bp, Homo sapiens
tgtcttactactttaaatcctacca

SEQ ID NO: 5129 - DNA, 25 bp, Homo sapiens
ttgagggaccaatattaccatctta

SEQ ID NO: 5130 - DNA, 25 bp, Homo sapiens
ttggtcttagctttacattttcagt

SEQ ID NO: 5131 - DNA, 25 bp, Homo sapiens
aatctcaggcttctggtgtatcggt

SEQ ID NO: 5132 - DNA, 25 bp, Homo sapiens
acaactcaactgggactatctagtc

SEQ ID NO: 5133 - DNA, 25 bp, Homo sapiens
ctgtaagccttcccgtaaatctcag

SEQ ID NO: 5134 - DNA, 25 bp, Homo sapiens
gaaaccttggccgaattgtcacaat

SEQ ID NO: 5135 - DNA, 25 bp, Homo sapiens
ggaactacactcttgagcaatacca

SEQ ID NO: 5136 - DNA, 25 bp, Homo sapiens
ggcctggaattggatacaactcaac

SEQ ID NO: 5137 - DNA, 25 bp, Homo sapiens
gtttacagtcattcgatatatctca

SEQ ID NO: 5138 - DNA, 25 bp, Homo sapiens
tcaacactgaactgcaactgtggca

SEQ ID NO: 5139 - DNA, 25 bp, Homo sapiens
tcggtatgggatgcagaactctggc

SEQ ID NO: 5140 - DNA, 25 bp, Homo sapiens
tgtcacaatagcagagccattcaac

SEQ ID NO: 5141 - DNA, 25 bp, Homo sapiens
ttggatttgctcaaggacacgaacc

SEQ ID NO: 5142 - DNA, 25 bp, Homo sapiens
actatcagtgtcctaggcaatacct

SEQ ID NO: 5143 - DNA, 25 bp, Homo sapiens
agggctttcttgggtcagaggactt

SEQ ID NO: 5144 - DNA, 25 bp, Homo sapiens
attattttggctctcaagctctgtt

SEQ ID NO: 5145 - DNA, 25 bp, Homo sapiens
caccccctccgcaattcaatgaggg

SEQ ID NO: 5146 - DNA, 25 bp, Homo sapiens
cagaagactctgcttgaccgatgac

SEQ ID NO: 5147 - DNA, 25 bp, Homo sapiens
cccccataaaccagctggagcagac

SEQ ID NO: 5148 - DNA, 25 bp, Homo sapiens
gattcgcagcattcaataccaggca

SEQ ID NO: 5149 - DNA, 25 bp, Homo sapiens
gcaatacctaacctactctgaaatt

SEQ ID NO: 5150 - DNA, 25 bp, Homo sapiens
gtatttcaagaggcattctcctttt

SEQ ID NO: 5151 - DNA, 25 bp, Homo sapiens
gtttgccatgtgtgtaaggtgctgt

SEQ ID NO: 5152 - DNA, 25 bp, Homo sapiens
tggactggtaggtttggtgaggccc

SEQ ID NO: 5153 - DNA, 25 bp, Homo sapiens
aatactgcagacatttccgaagagt

SEQ ID NO: 5154 - DNA, 25 bp, Homo sapiens
acctgattcctctagaaggctgtct

SEQ ID NO: 5155 - DNA, 25 bp, Homo sapiens
atctctccactgaggcaatttggaa

SEQ ID NO: 5156 - DNA, 25 bp, Homo sapiens
atttcaggagcaaactcttcaggct

SEQ ID NO: 5157 - DNA, 25 bp, Homo sapiens
ctatctctgttctattgaatgcctt

SEQ ID NO: 5158 - DNA, 25 bp, Homo sapiens
gaaggctgtctaacataccacatga

SEQ ID NO: 5159 - DNA, 25 bp, Homo sapiens
gaatgccttgttaacagccaacact

SEQ ID NO: 5160 - DNA, 25 bp, Homo sapiens
gagaatttgttttcaggtctgacac

SEQ ID NO: 5161 - DNA, 25 bp, Homo sapiens
gggacttcatatacctgattcctct

SEQ ID NO: 5162 - DNA, 25 bp, Homo sapiens
ggtggaggaccctggaaggacagca

SEQ ID NO: 5163 - DNA, 25 bp, Homo sapiens
gtatggtatccatctatctctgttc

SEQ ID NO: 5164 - DNA, 25 bp, Homo sapiens
acacgtgggcacctgagcacaggga

SEQ ID NO: 5165 - DNA, 25 bp, Homo sapiens
agaaatgcccagcaaagacccttcc

SEQ ID NO: 5166 - DNA, 25 bp, Homo sapiens
cagatggggaacactgtgcctccct

SEQ ID NO: 5167 - DNA, 25 bp, Homo sapiens
gacaagactggaagggcacctcggg

SEQ ID NO: 5168 - DNA, 25 bp, Homo sapiens
gcacctcgggttcgggaggagctgt

SEQ ID NO: 5169 - DNA, 25 bp, Homo sapiens
gccatcttgatgccaggacacacag

SEQ ID NO: 5170 - DNA, 25 bp, Homo sapiens
ggcaccagagggtccaagacaagac

SEQ ID NO: 5171 - DNA, 25 bp, Homo sapiens
tcagaggacagtgcacaggctagcc

SEQ ID NO: 5172 - DNA, 25 bp, Homo sapiens
tgaggatgtggccacttgacttgtg

SEQ ID NO: 5173 - DNA, 25 bp, Homo sapiens
tgcacaggctagcctggagctcacc

SEQ ID NO: 5174 - DNA, 25 bp, Homo sapiens
tgtgagtggctgagccagctccttg

SEQ ID NO: 5175 - DNA, 25 bp, Homo sapiens
aaagtgctcacgttaccttgacaca

SEQ ID NO: 5176 - DNA, 25 bp, Homo sapiens
catctcttccttgacatgcattgta

SEQ ID NO: 5177 - DNA, 25 bp, Homo sapiens
catttttgatagctgtcccatctgg

SEQ ID NO: 5178 - DNA, 25 bp, Homo sapiens
cttcgttcgcagagcttttcagatt

SEQ ID NO: 5179 - DNA, 25 bp, Homo sapiens
cttctagctgactcgcacagggatt

SEQ ID NO: 5180 - DNA, 25 bp, Homo sapiens
gcacagggattctcacaatagccga

SEQ ID NO: 5181 - DNA, 25 bp, Homo sapiens
ggtggataagctatccctgttgccg

SEQ ID NO: 5182 - DNA, 25 bp, Homo sapiens
gtaaataggttcttcttgttctgag

SEQ ID NO: 5183 - DNA, 25 bp, Homo sapiens
gtggttggcactagactggtggcag

SEQ ID NO: 5184 - DNA, 25 bp, Homo sapiens
tcccatctggtcatgtggttggcac

SEQ ID NO: 5185 - DNA, 25 bp, Homo sapiens
tgccggttcatggattacttctcta

SEQ ID NO: 5186 - DNA, 25 bp, Homo sapiens
aaagcattttcccttgctgtatttt

SEQ ID NO: 5187 - DNA, 25 bp, Homo sapiens
aactcttgtatttatgatatagctt

SEQ ID NO: 5188 - DNA, 25 bp, Homo sapiens
agctgcaaatttcatggcagttcat

SEQ ID NO: 5189 - DNA, 25 bp, Homo sapiens
agtataacaacacacatcaggtttt

SEQ ID NO: 5190 - DNA, 25 bp, Homo sapiens
atgttttgaaactcttgtatttatg

SEQ ID NO: 5191 - DNA, 25 bp, Homo sapiens
cttatatgatttttttgccttggta

SEQ ID NO: 5192 - DNA, 25 bp, Homo sapiens
gatacctagtatgatggagctgcaa

SEQ ID NO: 5193 - DNA, 25 bp, Homo sapiens
gcagttcatgcagtcggtcaagagg

SEQ ID NO: 5194 - DNA, 25 bp, Homo sapiens
tgcagtcggtcaagaggaggatttt

SEQ ID NO: 5195 - DNA, 25 bp, Homo sapiens
ttaaaaagccttgaatggcccttgt

SEQ ID NO: 5196 - DNA, 25 bp, Homo sapiens
ttctaaagcattttcccttgctgta

SEQ ID NO: 5197 - DNA, 25 bp, Homo sapiens
aatatgtctcgctagtgatgttttt

SEQ ID NO: 5198 - DNA, 25 bp, Homo sapiens
atatcaagatgattctggctgaaaa

SEQ ID NO: 5199 - DNA, 25 bp, Homo sapiens
atttttcagctctctgtataaacat

SEQ ID NO: 5200 - DNA, 25 bp, Homo sapiens
gaagaaacagataccatactcattt

SEQ ID NO: 5201 - DNA, 25 bp, Homo sapiens
gatgtttttatgatatccctgatcc

SEQ ID NO: 5202 - DNA, 25 bp, Homo sapiens
gttcatcaattcccattgcatcacc

SEQ ID NO: 5203 - DNA, 25 bp, Homo sapiens
gttgctccctgtgacaaaattttat

SEQ ID NO: 5204 - DNA, 25 bp, Homo sapiens
taggttaacattgttgctccctgtg

SEQ ID NO: 5205 - DNA, 25 bp, Homo sapiens
tatccctgatcctaactgaagagac

SEQ ID NO: 5206 - DNA, 25 bp, Homo sapiens
ttagaaagcaacttatcagctactt

SEQ ID NO: 5207 - DNA, 25 bp, Homo sapiens
tttggtctctatttcattttttgca

SEQ ID NO: 5208 - DNA, 25 bp, Homo sapiens
aacaagaactagcgctgcacatccg

SEQ ID NO: 5209 - DNA, 25 bp, Homo sapiens
cagcgccccgcagaagggggtgctg

SEQ ID NO: 5210 - DNA, 25 bp, Homo sapiens
cgtacaggcaattccgtcttcttaa

SEQ ID NO: 5211 - DNA, 25 bp, Homo sapiens
gcgggattaccagtccaagttggcc

SEQ ID NO: 5212 - DNA, 25 bp, Homo sapiens
ggagctgggatttgtcggcagcgcc

SEQ ID NO: 5213 - DNA, 25 bp, Homo sapiens
ggatgacgactccaaggtgggcttt

SEQ ID NO: 5214 - DNA, 25 bp, Homo sapiens
ggcaccaagtccattttgctgagcc

SEQ ID NO: 5215 - DNA, 25 bp, Homo sapiens
gggctttgacaagtggcctttcatg

SEQ ID NO: 5216 - DNA, 25 bp, Homo sapiens
tcaggcaggcacctagcaattccat

SEQ ID NO: 5217 - DNA, 25 bp, Homo sapiens
tgaacatcaacatgacttcccctat

SEQ ID NO: 5218 - DNA, 25 bp, Homo sapiens
tgatgctgcatggcactcagagtgc

SEQ ID NO: 5219 - DNA, 25 bp, Homo sapiens
agactcacaaggggcttcttggcct

SEQ ID NO: 5220 - DNA, 25 bp, Homo sapiens
agcctccacccacagaggggatgca

SEQ ID NO: 5221 - DNA, 25 bp, Homo sapiens
atgtgtcgctccaggtagcggacaa

SEQ ID NO: 5222 - DNA, 25 bp, Homo sapiens
cccctgaggtcactctgaggccagg

SEQ ID NO: 5223 - DNA, 25 bp, Homo sapiens
gccgaggcaggacacagagcacagc

SEQ ID NO: 5224 - DNA, 25 bp, Homo sapiens
gcctgcagcttcatttgcgagagcg

SEQ ID NO: 5225 - DNA, 25 bp, Homo sapiens
ggacgtcacccaaggctggtggtca

SEQ ID NO: 5226 - DNA, 25 bp, Homo sapiens
tcagtgtgaagggctccgtgccaac

SEQ ID NO: 5227 - DNA, 25 bp, Homo sapiens
tcatgtctctagattttctcgtcac

SEQ ID NO: 5228 - DNA, 25 bp, Homo sapiens
tcccctcacaggcgtcggttgtgag

SEQ ID NO: 5229 - DNA, 25 bp, Homo sapiens
ttgtgagtgtcagcaccaacttgcc

SEQ ID NO: 5230 - DNA, 25 bp, Homo sapiens
agcagaatgtgagcatggacttggc

SEQ ID NO: 5231 - DNA, 25 bp, Homo sapiens
cttcgtgaagatccagtccttcctg

SEQ ID NO: 5232 - DNA, 25 bp, Homo sapiens
gaacgggtccgaatacttcgtgaag

SEQ ID NO: 5233 - DNA, 25 bp, Homo sapiens
gccacgttcatgaagctgcggacgg

SEQ ID NO: 5234 - DNA, 25 bp, Homo sapiens
ggatttgaaggcgctcagtcagcag

SEQ ID NO: 5235 - DNA, 25 bp, Homo sapiens
ggcccccacggaggatttgaaggcg

SEQ ID NO: 5236 - DNA, 25 bp, Homo sapiens
ggcgctcagtcagcagaatgtgagc

SEQ ID NO: 5237 - DNA, 25 bp, Homo sapiens
gttcatgaagctgcggacggatgcg

SEQ ID NO: 5238 - DNA, 25 bp, Homo sapiens
tgaagctgcggacggatgcggtgct

SEQ ID NO: 5239 - DNA, 25 bp, Homo sapiens
tgctgccgttgactgtggctgaggt

SEQ ID NO: 5240 - DNA, 25 bp, Homo sapiens
tttccagaacatgaacgggtccgaa

SEQ ID NO: 5241 - DNA, 25 bp, Homo sapiens
cccgcgagaacactttacaacgacg

SEQ ID NO: 5242 - DNA, 25 bp, Homo sapiens
cgtcctgaccttggaggtgcgagtc

SEQ ID NO: 5243 - DNA, 25 bp, Homo sapiens
gaaagaagtggtgaccgcgagccgc

SEQ ID NO: 5244 - DNA, 25 bp, Homo sapiens
gagaacgggtacattcacccggtca

SEQ ID NO: 5245 - DNA, 25 bp, Homo sapiens
gaggagattcgtttccaaaccagag

SEQ ID NO: 5246 - DNA, 25 bp, Homo sapiens
gattcccatctatttaactttatta

SEQ ID NO: 5247 - DNA, 25 bp, Homo sapiens
gggaaacccgagagtgacctgaaag

SEQ ID NO: 5248 - DNA, 25 bp, Homo sapiens
gtgcgagtctgggaaaggcgcgctc

SEQ ID NO: 5249 - DNA, 25 bp, Homo sapiens
tctaccgtgaatgactctgcaagcc

SEQ ID NO: 5250 - DNA, 25 bp, Homo sapiens
tgaccgcgagccgcttatgtggaac

SEQ ID NO: 5251 - DNA, 25 bp, Homo sapiens
tgactctgcaagccttgctggtcca

SEQ ID NO: 5252 - DNA, 25 bp, Homo sapiens
acaggatttatcaccaagacacgcc

SEQ ID NO: 5253 - DNA, 25 bp, Homo sapiens
actgcacagtgttagtgggacctgg

SEQ ID NO: 5254 - DNA, 25 bp, Homo sapiens
atggagtcacttatgccaaactcta

SEQ ID NO: 5255 - DNA, 25 bp, Homo sapiens
caactcctgcgatcagcttgtgact

SEQ ID NO: 5256 - DNA, 25 bp, Homo sapiens
cagcttgtgacttacaaaccttgtt

SEQ ID NO: 5257 - DNA, 25 bp, Homo sapiens
cttacatggacttctgtcctttaaa

SEQ ID NO: 5258 - DNA, 25 bp, Homo sapiens
cttccaagcactcatagcccagata

SEQ ID NO: 5259 - DNA, 25 bp, Homo sapiens
gaaaactggggtttgcatcactcca

SEQ ID NO: 5260 - DNA, 25 bp, Homo sapiens
gactgtagtattccagatgagctgc

SEQ ID NO: 5261 - DNA, 25 bp, Homo sapiens
tagtgggacctgggggcaagtccct

SEQ ID NO: 5262 - DNA, 25 bp, Homo sapiens
tcacacacacatgcccgtaacagga

SEQ ID NO: 5263 - DNA, 25 bp, Homo sapiens
attaggagcaacttgccctgtaccc

SEQ ID NO: 5264 - DNA, 25 bp, Homo sapiens
cacaacacttatgtatgcaccccaa

SEQ ID NO: 5265 - DNA, 25 bp, Homo sapiens
cctcctgcgtcaatgccatggaagg

SEQ ID NO: 5266 - DNA, 25 bp, Homo sapiens
ctacaagtgaactccttgcccaggc

SEQ ID NO: 5267 - DNA, 25 bp, Homo sapiens
gaggctcttctccatcaatgagtgc

SEQ ID NO: 5268 - DNA, 25 bp, Homo sapiens
gaggcttggccactggatgttttca

SEQ ID NO: 5269 - DNA, 25 bp, Homo sapiens
gagtgcaagatcttctaaaccccaa

SEQ ID NO: 5270 - DNA, 25 bp, Homo sapiens
gatgttttcactaactacactctac

SEQ ID NO: 5271 - DNA, 25 bp, Homo sapiens
gcagcgtctccgttttggatacagt

SEQ ID NO: 5272 - DNA, 25 bp, Homo sapiens
gctcagcccttagcaatcggggagt

SEQ ID NO: 5273 - DNA, 25 bp, Homo sapiens
tgttttctctgggtacaccccaagc

SEQ ID NO: 5274 - DNA, 25 bp, Homo sapiens
agaggatgctaagcttcctactcac

SEQ ID NO: 5275 - DNA, 25 bp, Homo sapiens
ccgcttgtcctcttgtgatgttagg

SEQ ID NO: 5276 - DNA, 25 bp, Homo sapiens
cctactccccgcatctttggggaat

SEQ ID NO: 5277 - DNA, 25 bp, Homo sapiens
cgtgccttatgtctgtgtgtgatca

SEQ ID NO: 5278 - DNA, 25 bp, Homo sapiens
gagagaagtcagctgtcacggggaa

SEQ ID NO: 5279 - DNA, 25 bp, Homo sapiens
gtgggtgggacaatggctccccact

SEQ ID NO: 5280 - DNA, 25 bp, Homo sapiens
tagccagcctggactttggagcgtg

SEQ ID NO: 5281 - DNA, 25 bp, Homo sapiens
tccccatatgtcttccttactagac

SEQ ID NO: 5282 - DNA, 25 bp, Homo sapiens
tgcgctggtttgcggctttgggaaa

SEQ ID NO: 5283 - DNA, 25 bp, Homo sapiens
tggcaggggtgttctagctttttga

SEQ ID NO: 5284 - DNA, 25 bp, Homo sapiens
tttgaggacagctcctgtatccttc

SEQ ID NO: 5285 - DNA, 25 bp, Homo sapiens
cctttctttactccatcatggctgg

SEQ ID NO: 5286 - DNA, 25 bp, Homo sapiens
gaacccataaccatacacaggctat

SEQ ID NO: 5287 - DNA, 25 bp, Homo sapiens
gacatgcacacgggaaagccttaaa

SEQ ID NO: 5288 - DNA, 25 bp, Homo sapiens
gaccatatttactctttctaacctt

SEQ ID NO: 5289 - DNA, 25 bp, Homo sapiens
gagatggtcctacaagccgaaatga

SEQ ID NO: 5290 - DNA, 25 bp, Homo sapiens
gagccagacctgtaacacctgacat

SEQ ID NO: 5291 - DNA, 25 bp, Homo sapiens
gccctgttcaacctgattgacactt

SEQ ID NO: 5292 - DNA, 25 bp, Homo sapiens
ggacaaagagcgctatgtctccctg

SEQ ID NO: 5293 - DNA, 25 bp, Homo sapiens
gtaacacctgacatgatggttcctc

SEQ ID NO: 5294 - DNA, 25 bp, Homo sapiens
tagcatgctgctttttgtacttgga

SEQ ID NO: 5295 - DNA, 25 bp, Homo sapiens
ttcaatgtgacacctaactcttttc

SEQ ID NO: 5296 - DNA, 25 bp, Homo sapiens
agcaatgtggagaggcgtccagccc

SEQ ID NO: 5297 - DNA, 25 bp, Homo sapiens
agcaggacacagactatgaccacgt

SEQ ID NO: 5298 - DNA, 25 bp, Homo sapiens
caaccacaggcatcaggcaaccatt

SEQ ID NO: 5299 - DNA, 25 bp, Homo sapiens
cactgtagaggccggtcttggtgtc

SEQ ID NO: 5300 - DNA, 25 bp, Homo sapiens
ccccaggaccagcgagcgcaggggg

SEQ ID NO: 5301 - DNA, 25 bp, Homo sapiens
cctccatgtcaccgcactgtagagg

SEQ ID NO: 5302 - DNA, 25 bp, Homo sapiens
gagacagtgacacggagggcgacct

SEQ ID NO: 5303 - DNA, 25 bp, Homo sapiens
gcagcctgggatgacagcgccaggg

SEQ ID NO: 5304 - DNA, 25 bp, Homo sapiens
gcttcccaagatgccatggctggac

SEQ ID NO: 5305 - DNA, 25 bp, Homo sapiens
ggggtccacagacaatgaccttgag

SEQ ID NO: 5306 - DNA, 25 bp, Homo sapiens
tatgaccacgtcgcggatggtggcc

SEQ ID NO: 5307 - DNA, 25 bp, Homo sapiens
agcctggcgtctggacgccgagggc

SEQ ID NO: 5308 - DNA, 25 bp, Homo sapiens
catcctgaaccgctgcagcgagagc

SEQ ID NO: 5309 - DNA, 25 bp, Homo sapiens
ccctgctcgagggtgaagctgttga

SEQ ID NO: 5310 - DNA, 25 bp, Homo sapiens
ctgccgtctgaggctggagcgcagt

SEQ ID NO: 5311 - DNA, 25 bp, Homo sapiens
ctgctcgagggtgaagctgttgagg

SEQ ID NO: 5312 - DNA, 25 bp, Homo sapiens
ggaaagacgacgtcacaggctactt

SEQ ID NO: 5313 - DNA, 25 bp, Homo sapiens
gtgtccctgctcgagggtgaagctg

SEQ ID NO: 5314 - DNA, 25 bp, Homo sapiens
tatagagcctggcgtctggacgccg

SEQ ID NO: 5315 - DNA, 25 bp, Homo sapiens
tcctgaaccgctgcagcgagagcac

SEQ ID NO: 5316 - DNA, 25 bp, Homo sapiens
tctatagagcctggcgtctggacgc

SEQ ID NO: 5317 - DNA, 25 bp, Homo sapiens
tctgccgtctgaggctggagcgcag

SEQ ID NO: 5318 - DNA, 25 bp, Homo sapiens
caactgctgttccataaactcacct

SEQ ID NO: 5319 - DNA, 25 bp, Homo sapiens
gaagaatatcctgtagtcctgaagc

SEQ ID NO: 5320 - DNA, 25 bp, Homo sapiens
gactcaactacctgttttaatgcta

SEQ ID NO: 5321 - DNA, 25 bp, Homo sapiens
gactcatcttccggaagtattcctc

SEQ ID NO: 5322 - DNA, 25 bp, Homo sapiens
gatactttctactttttctagctac

SEQ ID NO: 5323 - DNA, 25 bp, Homo sapiens
gatctctgatgacctaacctaagca

SEQ ID NO: 5324 - DNA, 25 bp, Homo sapiens
gcaaaaccactgagcttctgggaag

SEQ ID NO: 5325 - DNA, 25 bp, Homo sapiens
ggaactatcttctttcattgacaag

SEQ ID NO: 5326 - DNA, 25 bp, Homo sapiens
ggagccacccaagggaatgatctct

SEQ ID NO: 5327 - DNA, 25 bp, Homo sapiens
ttaacaagcgctcagactttgcctc

SEQ ID NO: 5328 - DNA, 25 bp, Homo sapiens
ttaatgctaagggccctctactaaa

SEQ ID NO: 5329 - DNA, 25 bp, Homo sapiens
acccgccactccagaaatccaggag

SEQ ID NO: 5330 - DNA, 25 bp, Homo sapiens
cgggcttttagcagcatgtacccaa

SEQ ID NO: 5331 - DNA, 25 bp, Homo sapiens
gaagctgtgcagtataaaactcaag

SEQ ID NO: 5332 - DNA, 25 bp, Homo sapiens
gaggcttatctgaggccaaacccgc

SEQ ID NO: 5333 - DNA, 25 bp, Homo sapiens
gatgacgagctgacgggcttttagc

SEQ ID NO: 5334 - DNA, 25 bp, Homo sapiens
gattccttcaactggctactgagtc

SEQ ID NO: 5335 - DNA, 25 bp, Homo sapiens
gccaaaatgatacctggaggcttat

SEQ ID NO: 5336 - DNA, 25 bp, Homo sapiens
gctactgagtcatgatccttgctga

SEQ ID NO: 5337 - DNA, 25 bp, Homo sapiens
gtacccaaagtgttctgattccttc

SEQ ID NO: 5338 - DNA, 25 bp, Homo sapiens
tgaggacttggtacttactggatac

SEQ ID NO: 5339 - DNA, 25 bp, Homo sapiens
ttcaaaagtcttcccggacaaaatg

SEQ ID NO: 5340 - DNA, 25 bp, Homo sapiens
acaaggattacttcgtgcctcagct

SEQ ID NO: 5341 - DNA, 25 bp, Homo sapiens
cagctctacagctttctcaaacggc

SEQ ID NO: 5342 - DNA, 25 bp, Homo sapiens
gaagaagcatcccgtcaatgttgac

SEQ ID NO: 5343 - DNA, 25 bp, Homo sapiens
gctgatcatcaccaggggcttacag

SEQ ID NO: 5344 - DNA, 25 bp, Homo sapiens
gttacctgctggtttgtgcacaaca

SEQ ID NO: 5345 - DNA, 25 bp, Homo sapiens
tacataccccctacaaacaagttct

SEQ ID NO: 5346 - DNA, 25 bp, Homo sapiens
tattaatatacatctttcccctgtc

SEQ ID NO: 5347 - DNA, 25 bp, Homo sapiens
tcccctgtcacttttgcagatattc

SEQ ID NO: 5348 - DNA, 25 bp, Homo sapiens
tctcacctaaagcccacggactaat

SEQ ID NO: 5349 - DNA, 25 bp, Homo sapiens
ttctgggaatctacataccccctac

SEQ ID NO: 5350 - DNA, 25 bp, Homo sapiens
ttctgttttacttcatcgtgtttgg

SEQ ID NO: 5351 - DNA, 25 bp, Homo sapiens
agcagacgtgagtgtgactttttga

SEQ ID NO: 5352 - DNA, 25 bp, Homo sapiens
cacagcaatagtccccaatacgtag

SEQ ID NO: 5353 - DNA, 25 bp, Homo sapiens
cggcagatactactggggtggacag

SEQ ID NO: 5354 - DNA, 25 bp, Homo sapiens
gaagaggggtcttttatccttgtcg

SEQ ID NO: 5355 - DNA, 25 bp, Homo sapiens
gaattggaaggggtcatggtactca

SEQ ID NO: 5356 - DNA, 25 bp, Homo sapiens
gatttttgctcttctgtatgtgaca

SEQ ID NO: 5357 - DNA, 25 bp, Homo sapiens
ggggtggacagtacacctgggacat

SEQ ID NO: 5358 - DNA, 25 bp, Homo sapiens
gtcatgcagccaatccaaacggcag

SEQ ID NO: 5359 - DNA, 25 bp, Homo sapiens
gttggtgttcataatttcagttcta

SEQ ID NO: 5360 - DNA, 25 bp, Homo sapiens
tatattcctctaaaactctcaagca

SEQ ID NO: 5361 - DNA, 25 bp, Homo sapiens
tatgaagatcaggcccttcttccca

SEQ ID NO: 5362 - DNA, 25 bp, Homo sapiens
acacacgtgtgatgtatgttggttt

SEQ ID NO: 5363 - DNA, 25 bp, Homo sapiens
acccatgcacagaacaagccacagg

SEQ ID NO: 5364 - DNA, 25 bp, Homo sapiens
agggttgatatattctttccatgca

SEQ ID NO: 5365 - DNA, 25 bp, Homo sapiens
atttcttctgtagctattctttgac

SEQ ID NO: 5366 - DNA, 25 bp, Homo sapiens
gctattctttgaccaaactgtgggt

SEQ ID NO: 5367 - DNA, 25 bp, Homo sapiens
gcttttacggtgatattgtgcatgc

SEQ ID NO: 5368 - DNA, 25 bp, Homo sapiens
ggctgtgaaaattacacccatgcac

SEQ ID NO: 5369 - DNA, 25 bp, Homo sapiens
tcagtttggctgtaatttaattccc

SEQ ID NO: 5370 - DNA, 25 bp, Homo sapiens
tggttttttagtgcaatttcttctg

SEQ ID NO: 5371 - DNA, 25 bp, Homo sapiens
ttatttatttttgtactgtgctgat

SEQ ID NO: 5372 - DNA, 25 bp, Homo sapiens
tttgaaactgctaattacacacgtg

SEQ ID NO: 5373 - DNA, 25 bp, Homo sapiens
aattgtggttttcctggtgtcacgc

SEQ ID NO: 5374 - DNA, 25 bp, Homo sapiens
agacacttctgcagggatctgcctg

SEQ ID NO: 5375 - DNA, 25 bp, Homo sapiens
agacagagacgtgtacagtggcccc

SEQ ID NO: 5376 - DNA, 25 bp, Homo sapiens
cacggtgattagtcccagagctcgg

SEQ ID NO: 5377 - DNA, 25 bp, Homo sapiens
ccctggtgcttctatcctaatacca

SEQ ID NO: 5378 - DNA, 25 bp, Homo sapiens
cctcggctcacaacacagattgact

SEQ ID NO: 5379 - DNA, 25 bp, Homo sapiens
cttctatcctaataccatcgacgtc

SEQ ID NO: 5380 - DNA, 25 bp, Homo sapiens
gacgtccctccagaagaggagtgtg

SEQ ID NO: 5381 - DNA, 25 bp, Homo sapiens
gattgactgctctgactttgactac

SEQ ID NO: 5382 - DNA, 25 bp, Homo sapiens
gccccccgtgaaagacagaattgtg

SEQ ID NO: 5383 - DNA, 25 bp, Homo sapiens
gtgtgcaaataagggctgctgtttc

SEQ ID NO: 5384 - DNA, 25 bp, Homo sapiens
agtggttgtttcccttgcatgggac

SEQ ID NO: 5385 - DNA, 25 bp, Homo sapiens
cagaagtggttgtttcccttgcatg

SEQ ID NO: 5386 - DNA, 25 bp, Homo sapiens
cggagcagattgcagcggacatccc

SEQ ID NO: 5387 - DNA, 25 bp, Homo sapiens
ctagctagaggatctgtgaccccag

SEQ ID NO: 5388 - DNA, 25 bp, Homo sapiens
gacgaaagcttggctccaaagcatc

SEQ ID NO: 5389 - DNA, 25 bp, Homo sapiens
gattgcagcggacatcccagaagtg

SEQ ID NO: 5390 - DNA, 25 bp, Homo sapiens
gcatgggacgaaagcttggctccaa

SEQ ID NO: 5391 - DNA, 25 bp, Homo sapiens
gccccggagcagattgcagcggaca

SEQ ID NO: 5392 - DNA, 25 bp, Homo sapiens
gcctagctagaggatctgtgacccc

SEQ ID NO: 5393 - DNA, 25 bp, Homo sapiens
ggttgtttcccttgcatgggacgaa

SEQ ID NO: 5394 - DNA, 25 bp, Homo sapiens
gtttcccttgcatgggacgaaagct

SEQ ID NO: 5395 - DNA, 25 bp, Homo sapiens
acccgacaggaccagtgcatctata

SEQ ID NO: 5396 - DNA, 25 bp, Homo sapiens
caagagcatttcgctcacttgctga

SEQ ID NO: 5397 - DNA, 25 bp, Homo sapiens
catgcttgcttttgacgtgaacgat

SEQ ID NO: 5398 - DNA, 25 bp, Homo sapiens
gacaccaagacctacatgcttgctt

SEQ ID NO: 5399 - DNA, 25 bp, Homo sapiens
gggaatcctagcaggacacagcctt

SEQ ID NO: 5400 - DNA, 25 bp, Homo sapiens
gggaccatctccagatacgtgggag

SEQ ID NO: 5401 - DNA, 25 bp, Homo sapiens
gtcagatgtcgtgtacaccgattgg

SEQ ID NO: 5402 - DNA, 25 bp, Homo sapiens
gtgggaggccaagagcatttcgctc

SEQ ID NO: 5403 - DNA, 25 bp, Homo sapiens
tagcaggacacagccttggatcagg

SEQ ID NO: 5404 - DNA, 25 bp, Homo sapiens
tccagcgggaaaatgggaccatctc

SEQ ID NO: 5405 - DNA, 25 bp, Homo sapiens
tgctgatcctcagggacaccaagac

SEQ ID NO: 5406 - DNA, 25 bp, Homo sapiens
aataagtcggttcaggagatccaag

SEQ ID NO: 5407 - DNA, 25 bp, Homo sapiens
acccccaacaagacagaggacacga

SEQ ID NO: 5408 - DNA, 25 bp, Homo sapiens
agtggttttatatcgcatcggcctt

SEQ ID NO: 5409 - DNA, 25 bp, Homo sapiens
agttctacgaagctctcgactgctt

SEQ ID NO: 5410 - DNA, 25 bp, Homo sapiens
gagacgaccaaggagcaactgggag

SEQ ID NO: 5411 - DNA, 25 bp, Homo sapiens
gagatccaagcaaccttcttttact

SEQ ID NO: 5412 - DNA, 25 bp, Homo sapiens
gaggagtacaataagtcggttcagg

SEQ ID NO: 5413 - DNA, 25 bp, Homo sapiens
ggacacgatctttctcagagagtac

SEQ ID NO: 5414 - DNA, 25 bp, Homo sapiens
gtgagccactggagaagcagcacga

SEQ ID NO: 5415 - DNA, 25 bp, Homo sapiens
tatgctgacaagccagagacgacca

SEQ ID NO: 5416 - DNA, 25 bp, Homo sapiens
tcgcatcggcctttcgaaacgagga

SEQ ID NO: 5417 - DNA, 25 bp, Homo sapiens
aggggccatgaatcaccttttggtc

SEQ ID NO: 5418 - DNA, 25 bp, Homo sapiens
agggtgatattaaccaggggccatg

SEQ ID NO: 5419 - DNA, 25 bp, Homo sapiens
agttgttgcccacagctgtatgatt

SEQ ID NO: 5420 - DNA, 25 bp, Homo sapiens
cacagcctcttagatgcagttctga

SEQ ID NO: 5421 - DNA, 25 bp, Homo sapiens
caccagtctgactgtttccatcaag

SEQ ID NO: 5422 - DNA, 25 bp, Homo sapiens
caccttttggtctggagggaagcct

SEQ ID NO: 5423 - DNA, 25 bp, Homo sapiens
ccatcaagggtacactgccttctca

SEQ ID NO: 5424 - DNA, 25 bp, Homo sapiens
gaagatggtaccaccagtctgactg

SEQ ID NO: 5425 - DNA, 25 bp, Homo sapiens
gccttggggctgatcgagttgttgc

SEQ ID NO: 5426 - DNA, 25 bp, Homo sapiens
gtacttcatgctgtctacactaaga

SEQ ID NO: 5427 - DNA, 25 bp, Homo sapiens
tgatggtggtatgttttcaggctag

SEQ ID NO: 5428 - DNA, 25 bp, Homo sapiens
ccagggcacctaccaggatgtgggc

SEQ ID NO: 5429 - DNA, 25 bp, Homo sapiens
ccatgtatgaggacatctcccgggg

SEQ ID NO: 5430 - DNA, 25 bp, Homo sapiens
ctgcctctaggggagctgattgtag

SEQ ID NO: 5431 - DNA, 25 bp, Homo sapiens
gaagctcgggttggatgccggggat

SEQ ID NO: 5432 - DNA, 25 bp, Homo sapiens
gattgtagcagcctcgttagtgtca

SEQ ID NO: 5433 - DNA, 25 bp, Homo sapiens
ggcagcctcaacataggagatgtcc

SEQ ID NO: 5434 - DNA, 25 bp, Homo sapiens
gggtaatgagcccttaatcgctgcc

SEQ ID NO: 5435 - DNA, 25 bp, Homo sapiens
ggtgggagggtaacctcactcttct

SEQ ID NO: 5436 - DNA, 25 bp, Homo sapiens
tcccctcacccagcgggtaatgagc

SEQ ID NO: 5437 - DNA, 25 bp, Homo sapiens
tgaacctggacgactgctccatgta

SEQ ID NO: 5438 - DNA, 25 bp, Homo sapiens
tgggggcttccttagtcatattccc

SEQ ID NO: 5439 - DNA, 25 bp, Homo sapiens
accagagctagttttcagctgctca

SEQ ID NO: 5440 - DNA, 25 bp, Homo sapiens
accagccactgttgcagcatgagtt

SEQ ID NO: 5441 - DNA, 25 bp, Homo sapiens
gaatgtgctatgaagctttctttcc

SEQ ID NO: 5442 - DNA, 25 bp, Homo sapiens
gagtcccatttgccttgcaattagc

SEQ ID NO: 5443 - DNA, 25 bp, Homo sapiens
gctgaaggtcttagtaccagagcta

SEQ ID NO: 5444 - DNA, 25 bp, Homo sapiens
gttttcagctgctcagaattcatct

SEQ ID NO: 5445 - DNA, 25 bp, Homo sapiens
tacagagtattcctctcttcacacc

SEQ ID NO: 5446 - DNA, 25 bp, Homo sapiens
tcccattctgtgtatgagtcccatt

SEQ ID NO: 5447 - DNA, 25 bp, Homo sapiens
tctgtgtatgagtcccatttgcctt

SEQ ID NO: 5448 - DNA, 25 bp, Homo sapiens
tgttgcagcatgagttcccagcagc

SEQ ID NO: 5449 - DNA, 25 bp, Homo sapiens
tttcctacacactctgagtctctga

SEQ ID NO: 5450 - DNA, 25 bp, Homo sapiens
aaaatacttctgagaccttgtttca

SEQ ID NO: 5451 - DNA, 25 bp, Homo sapiens
acttgcgtactcagcacagcagtgg

SEQ ID NO: 5452 - DNA, 25 bp, Homo sapiens
atctcagggaaacttgcgtactcag

SEQ ID NO: 5453 - DNA, 25 bp, Homo sapiens
cagaccacacctaaaactgcctttc

SEQ ID NO: 5454 - DNA, 25 bp, Homo sapiens
cagagttagaacggagccctcggtg

SEQ ID NO: 5455 - DNA, 25 bp, Homo sapiens
ccctcggtgatgcggacatctcagg

SEQ ID NO: 5456 - DNA, 25 bp, Homo sapiens
ctgcctttctgcttctcttaaagga

SEQ ID NO: 5457 - DNA, 25 bp, Homo sapiens
gagtgttcctgttgaatcttgcaca

SEQ ID NO: 5458 - DNA, 25 bp, Homo sapiens
gggacgatctttgaatatacttacc

SEQ ID NO: 5459 - DNA, 25 bp, Homo sapiens
gggtagcccatgttatgtgactatc

SEQ ID NO: 5460 - DNA, 25 bp, Homo sapiens
tttgctgtatatcccctcaaaatcc

SEQ ID NO: 5461 - DNA, 25 bp, Homo sapiens
aaatgtgggaagacgctgacctctg

SEQ ID NO: 5462 - DNA, 25 bp, Homo sapiens
cacgaaggcaaaccctactgcaacc

SEQ ID NO: 5463 - DNA, 25 bp, Homo sapiens
ccacgctgagcacgaaggcaaaccc

SEQ ID NO: 5464 - DNA, 25 bp, Homo sapiens
gagcacgaaggcaaaccctactgca

SEQ ID NO: 5465 - DNA, 25 bp, Homo sapiens
gccatgtttgggcctaaaggctttg

SEQ ID NO: 5466 - DNA, 25 bp, Homo sapiens
gccgagagggtgacctctctgggca

SEQ ID NO: 5467 - DNA, 25 bp, Homo sapiens
ggccctgcctgaagtgcgagaaatg

SEQ ID NO: 5468 - DNA, 25 bp, Homo sapiens
gtcccaagtgcaacaaggaggtgta

SEQ ID NO: 5469 - DNA, 25 bp, Homo sapiens
tgacctctctgggcaaggactggca

SEQ ID NO: 5470 - DNA, 25 bp, Homo sapiens
tgtacttcgccgagagggtgacctc

SEQ ID NO: 5471 - DNA, 25 bp, Homo sapiens
tgtttgggcctaaaggctttgggcg

SEQ ID NO: 5472 - DNA, 25 bp, Homo sapiens
accagcccttcatgggtggtgacgt

SEQ ID NO: 5473 - DNA, 25 bp, Homo sapiens
agcaccctggagagtgaatgcccct

SEQ ID NO: 5474 - DNA, 25 bp, Homo sapiens
atatagacagtgcccttggtgcgag

SEQ ID NO: 5475 - DNA, 25 bp, Homo sapiens
cacctgcacattgggtggggctcct

SEQ ID NO: 5476 - DNA, 25 bp, Homo sapiens
ccttagcagccctggatggtggcca

SEQ ID NO: 5477 - DNA, 25 bp, Homo sapiens
cgccaagtttggcaccatgtcggcc

SEQ ID NO: 5478 - DNA, 25 bp, Homo sapiens
gaaaaggaacttgccctgagcactc

SEQ ID NO: 5479 - DNA, 25 bp, Homo sapiens
gatgggttcttagagccttagcagc

SEQ ID NO: 5480 - DNA, 25 bp, Homo sapiens
gtccccagcctacttcacaagggga

SEQ ID NO: 5481 - DNA, 25 bp, Homo sapiens
tccctggcagggcgccaagtttggc

SEQ ID NO: 5482 - DNA, 25 bp, Homo sapiens
tggggccacttggtagtgtccccag

SEQ ID NO: 5483 - DNA, 25 bp, Homo sapiens
agtcaaaccagctccttcaagaagc

SEQ ID NO: 5484 - DNA, 25 bp, Homo sapiens
cccatcccagtttatcctgtatcat

SEQ ID NO: 5485 - DNA, 25 bp, Homo sapiens
ctgtacctggagccatctgggataa

SEQ ID NO: 5486 - DNA, 25 bp, Homo sapiens
gattcccacatcctctgagttggaa

SEQ ID NO: 5487 - DNA, 25 bp, Homo sapiens
gctcttggcttggcatggctaagtt

SEQ ID NO: 5488 - DNA, 25 bp, Homo sapiens
ggataagactttgacccatgactcc

SEQ ID NO: 5489 - DNA, 25 bp, Homo sapiens
gtatcatttgagctgggattcccac

SEQ ID NO: 5490 - DNA, 25 bp, Homo sapiens
gtcttgggaagtccttctccatgtc

SEQ ID NO: 5491 - DNA, 25 bp, Homo sapiens
tatggctatagcaccagctctttgg

SEQ ID NO: 5492 - DNA, 25 bp, Homo sapiens
tcatctggttgggctggattccctc

SEQ ID NO: 5493 - DNA, 25 bp, Homo sapiens
tgataagccttcccagttgactgaa

SEQ ID NO: 5494 - DNA, 25 bp, Homo sapiens
aaagctgcaatcaaccacagtcatg

SEQ ID NO: 5495 - DNA, 25 bp, Homo sapiens
aactaccacacatttctgatataca

SEQ ID NO: 5496 - DNA, 25 bp, Homo sapiens
aagccaggccattgcgacgaagaaa

SEQ ID NO: 5497 - DNA, 25 bp, Homo sapiens
accaaagctggcaccagggctcgga

SEQ ID NO: 5498 - DNA, 25 bp, Homo sapiens
atgaacccctacatgaagcttgctc

SEQ ID NO: 5499 - DNA, 25 bp, Homo sapiens
atgaactggacctgcaccaaagctg

SEQ ID NO: 5500 - DNA, 25 bp, Homo sapiens
gacctgtccattcaaaactaccaca

SEQ ID NO: 5501 - DNA, 25 bp, Homo sapiens
gagaacttactatcatcctctaatt

SEQ ID NO: 5502 - DNA, 25 bp, Homo sapiens
gagccagccttgcagtaggcagtag

SEQ ID NO: 5503 - DNA, 25 bp, Homo sapiens
gcaagatttttcagaccaactctct

SEQ ID NO: 5504 - DNA, 25 bp, Homo sapiens
gctcggaaggtctctgaactcagaa

SEQ ID NO: 5505 - DNA, 25 bp, Homo sapiens
acagaagattgccttacgctcgtga

SEQ ID NO: 5506 - DNA, 25 bp, Homo sapiens
agacggtgcagtcggctgcatactc

SEQ ID NO: 5507 - DNA, 25 bp, Homo sapiens
attcagcagcatggacagtcactct

SEQ ID NO: 5508 - DNA, 25 bp, Homo sapiens
cagtcgggagtgtggtcagtctgcc

SEQ ID NO: 5509 - DNA, 25 bp, Homo sapiens
cgctcgtgagcgtgagaagccataa

SEQ ID NO: 5510 - DNA, 25 bp, Homo sapiens
cttctccaagccagaaaccacattt

SEQ ID NO: 5511 - DNA, 25 bp, Homo sapiens
gagagaccgaattctgtggctcagc

SEQ ID NO: 5512 - DNA, 25 bp, Homo sapiens
gagcccacaggattcagcagcatgg

SEQ ID NO: 5513 - DNA, 25 bp, Homo sapiens
gattttggcatcttgtttttctaac

SEQ ID NO: 5514 - DNA, 25 bp, Homo sapiens
ggctgcatactcccagtcgggagtg

SEQ ID NO: 5515 - DNA, 25 bp, Homo sapiens
tggctcagcacacaggactgaccca

SEQ ID NO: 5516 - DNA, 25 bp, Homo sapiens
acagctacctcttctatggactggt

SEQ ID NO: 5517 - DNA, 25 bp, Homo sapiens
acagtgtgtttgtgattgtttgctc

SEQ ID NO: 5518 - DNA, 25 bp, Homo sapiens
cacactgtgggactcttcttaactt

SEQ ID NO: 5519 - DNA, 25 bp, Homo sapiens
ctgaggggtccagaagcttcgaggc

SEQ ID NO: 5520 - DNA, 25 bp, Homo sapiens
gagtgcctgaggggtccagaagctt

SEQ ID NO: 5521 - DNA, 25 bp, Homo sapiens
gattccacagaatttcatagctgac

SEQ ID NO: 5522 - DNA, 25 bp, Homo sapiens
gccaccagactgacaaatgtgtatc

SEQ ID NO: 5523 - DNA, 25 bp, Homo sapiens
gcctgtgtaggcagtcatggcacca

SEQ ID NO: 5524 - DNA, 25 bp, Homo sapiens
tcatagctgactactttgagacgag

SEQ ID NO: 5525 - DNA, 25 bp, Homo sapiens
tgtgggactcttcttaacttaaatt

SEQ ID NO: 5526 - DNA, 25 bp, Homo sapiens
ttgagacgagcagccagtgctccaa

SEQ ID NO: 5527 - DNA, 25 bp, Homo sapiens
aaactactttaatacacattcattt

SEQ ID NO: 5528 - DNA, 25 bp, Homo sapiens
atattcatagattgttggtgtttaa

SEQ ID NO: 5529 - DNA, 25 bp, Homo sapiens
atccaagacgtatatccaaatttgt

SEQ ID NO: 5530 - DNA, 25 bp, Homo sapiens
caaatcgtatcagtgtttgtgaata

SEQ ID NO: 5531 - DNA, 25 bp, Homo sapiens
cagctgtttaacatgtagtttagat

SEQ ID NO: 5532 - DNA, 25 bp, Homo sapiens
gattgttaatgattggtgctcttaa

SEQ ID NO: 5533 - DNA, 25 bp, Homo sapiens
gcctattctaccagttaaactactt

SEQ ID NO: 5534 - DNA, 25 bp, Homo sapiens
gtagaatgtattcagctgtttaaca

SEQ ID NO: 5535 - DNA, 25 bp, Homo sapiens
gtatatccaaatttgtcctgtagta

SEQ ID NO: 5536 - DNA, 25 bp, Homo sapiens
gttggtgtttaaagatctgaagtgt

SEQ ID NO: 5537 - DNA, 25 bp, Homo sapiens
taaagcctattctaccagttaaact

SEQ ID NO: 5538 - DNA, 25 bp, Homo sapiens
aactggcccgtggagactgagatca

SEQ ID NO: 5539 - DNA, 25 bp, Homo sapiens
aagtctcctgtcttatggtccagaa

SEQ ID NO: 5540 - DNA, 25 bp, Homo sapiens
cagtccttggggttaagtctcctgt

SEQ ID NO: 5541 - DNA, 25 bp, Homo sapiens
catgaagagcttgtgtcctgtcctt

SEQ ID NO: 5542 - DNA, 25 bp, Homo sapiens
cctttcttgcagattctatttcccc

SEQ ID NO: 5543 - DNA, 25 bp, Homo sapiens
gatccttcgggtgctggaagtctcc

SEQ ID NO: 5544 - DNA, 25 bp, Homo sapiens
gctcttgcagttgctctgacgtaga

SEQ ID NO: 5545 - DNA, 25 bp, Homo sapiens
gctggctctgacaagatggtccatt

SEQ ID NO: 5546 - DNA, 25 bp, Homo sapiens
tagagttcggtctgacagtccttgg

SEQ ID NO: 5547 - DNA, 25 bp, Homo sapiens
tgctaatacctcttactttgcttga

SEQ ID NO: 5548 - DNA, 25 bp, Homo sapiens
ttgagaatcctctcctttcttatta

SEQ ID NO: 5549 - DNA, 25 bp, Homo sapiens
aatgctgaactccttgttagccctt

SEQ ID NO: 5550 - DNA, 25 bp, Homo sapiens
acaggtgggctgtattcacgccatt

SEQ ID NO: 5551 - DNA, 25 bp, Homo sapiens
agaatgcattccctgaatctgtgcc

SEQ ID NO: 5552 - DNA, 25 bp, Homo sapiens
aggagtggttctcatttggtctgcc

SEQ ID NO: 5553 - DNA, 25 bp, Homo sapiens
agggggttcttattttgcattccag

SEQ ID NO: 5554 - DNA, 25 bp, Homo sapiens
catccaggtcttgactcatggcagc

SEQ ID NO: 5555 - DNA, 25 bp, Homo sapiens
cccccactaagaccctggtctgagg

SEQ ID NO: 5556 - DNA, 25 bp, Homo sapiens
gatccagaacagtggctcgtatccc

SEQ ID NO: 5557 - DNA, 25 bp, Homo sapiens
gatttgattcattttcctgttcagt

SEQ ID NO: 5558 - DNA, 25 bp, Homo sapiens
tcaaagtgttgtgttccctggctga

SEQ ID NO: 5559 - DNA, 25 bp, Homo sapiens
tcgtatcccaaatctgtcagcatct

SEQ ID NO: 5560 - DNA, 25 bp, Homo sapiens
atactctgtctggattgggggctcc

SEQ ID NO: 5561 - DNA, 25 bp, Homo sapiens
attattgctccccctgagcgtaaat

SEQ ID NO: 5562 - DNA, 25 bp, Homo sapiens
ctccatctaccttccagtcaggatg

SEQ ID NO: 5563 - DNA, 25 bp, Homo sapiens
gaaggaaatcactgctctggctcct

SEQ ID NO: 5564 - DNA, 25 bp, Homo sapiens
gacattgatatccgcaaggacctgt

SEQ ID NO: 5565 - DNA, 25 bp, Homo sapiens
gatggccaagtcatcactatcggca

SEQ ID NO: 5566 - DNA, 25 bp, Homo sapiens
gcaagagtacgatgaggcaggccca

SEQ ID NO: 5567 - DNA, 25 bp, Homo sapiens
ggatgacggtattatgcttcttgga

SEQ ID NO: 5568 - DNA, 25 bp, Homo sapiens
gtacagtttgtttacacacgtgcaa

SEQ ID NO: 5569 - DNA, 25 bp, Homo sapiens
gtaccctggtattgctgatcgtatg

SEQ ID NO: 5570 - DNA, 25 bp, Homo sapiens
ttcttggagtctcccaaaccacctt

SEQ ID NO: 5571 - DNA, 25 bp, Homo sapiens
aagtgggcggtttgtcttttgatct

SEQ ID NO: 5572 - DNA, 25 bp, Homo sapiens
atctttggtcatctatgtcacacaa

SEQ ID NO: 5573 - DNA, 25 bp, Homo sapiens
cctccctgtagacatctatcttatt

SEQ ID NO: 5574 - DNA, 25 bp, Homo sapiens
ctttcccttttggatgtgcgtgtgt

SEQ ID NO: 5575 - DNA, 25 bp, Homo sapiens
gcgtgtgccatgtgcgtggcacgca

SEQ ID NO: 5576 - DNA, 25 bp, Homo sapiens
ggctctggtcttttctaaagtgggc

SEQ ID NO: 5577 - DNA, 25 bp, Homo sapiens
gtcttcttactttgataactcttct

SEQ ID NO: 5578 - DNA, 25 bp, Homo sapiens
gtgggtctgtggtatctgacactgt

SEQ ID NO: 5579 - DNA, 25 bp, Homo sapiens
tgtaaactgaacccttatccttgtc

SEQ ID NO: 5580 - DNA, 25 bp, Homo sapiens
tgtgcgtgtgaacggctttgggtcc

SEQ ID NO: 5581 - DNA, 25 bp, Homo sapiens
ttgtttgcggggggctggggatgca

SEQ ID NO: 5582 - DNA, 25 bp, Homo sapiens
aaggatttattctcagaacaccaag

SEQ ID NO: 5583 - DNA, 25 bp, Homo sapiens
agaaatcccctaactgatttccatc

SEQ ID NO: 5584 - DNA, 25 bp, Homo sapiens
cagaacaccaagtaaatctatctct

SEQ ID NO: 5585 - DNA, 25 bp, Homo sapiens
cagctttctctttgttcttcaatgt

SEQ ID NO: 5586 - DNA, 25 bp, Homo sapiens
ctgtgtgtgaattcctttagactaa

SEQ ID NO: 5587 - DNA, 25 bp, Homo sapiens
gactaagggcaggaagacttccagc

SEQ ID NO: 5588 - DNA, 25 bp, Homo sapiens
gagcacgggcgttatgtaagtttct

SEQ ID NO: 5589 - DNA, 25 bp, Homo sapiens
ggtgtcataactagagcacgggcgt

SEQ ID NO: 5590 - DNA, 25 bp, Homo sapiens
tgagaccaagtctctctaagacaaa

SEQ ID NO: 5591 - DNA, 25 bp, Homo sapiens
tttccatccaaacctaccttataga

SEQ ID NO: 5592 - DNA, 25 bp, Homo sapiens
tttggcaagaaatcccctaactgat

SEQ ID NO: 5593 - DNA, 25 bp, Homo sapiens
accatgcaggccttggagatagagc

SEQ ID NO: 5594 - DNA, 25 bp, Homo sapiens
agacagagaaccgctactgcgtgca

SEQ ID NO: 5595 - DNA, 25 bp, Homo sapiens
atgcccacctgactcagtacaagaa

SEQ ID NO: 5596 - DNA, 25 bp, Homo sapiens
cagtacaagaaagaaccggtgacca

SEQ ID NO: 5597 - DNA, 25 bp, Homo sapiens
cgcaccatgcaggccttggagatag

SEQ ID NO: 5598 - DNA, 25 bp, Homo sapiens
cggagacagagaaccgctactgcgt

SEQ ID NO: 5599 - DNA, 25 bp, Homo sapiens
gcagagtggcaagagtgagatctcg

SEQ ID NO: 5600 - DNA, 25 bp, Homo sapiens
gcccacctgactcagtacaagaaag

SEQ ID NO: 5601 - DNA, 25 bp, Homo sapiens
gccttggagatagagctgcagtccc

SEQ ID NO: 5602 - DNA, 25 bp, Homo sapiens
ggaatacaaaatcctgctggatgtg

SEQ ID NO: 5603 - DNA, 25 bp, Homo sapiens
tacaaaatcctgctggatgtgaaga

SEQ ID NO: 5604 - DNA, 25 bp, Homo sapiens
aggtcttgtgtcctctatagcaggc

SEQ ID NO: 5605 - DNA, 25 bp, Homo sapiens
attttcccttcatctaacattgatt

SEQ ID NO: 5606 - DNA, 25 bp, Homo sapiens
ccttgctcctggacacagtgaagaa

SEQ ID NO: 5607 - DNA, 25 bp, Homo sapiens
ctgaaccctttggaccagctgggga

SEQ ID NO: 5608 - DNA, 25 bp, Homo sapiens
gaacctttgtgatatcctgaaccct

SEQ ID NO: 5609 - DNA, 25 bp, Homo sapiens
gatgaagctgaagacccgttagggt

SEQ ID NO: 5610 - DNA, 25 bp, Homo sapiens
ggaaacagaatggctccaatccttt

SEQ ID NO: 5611 - DNA, 25 bp, Homo sapiens
ggcatgatcactgtggcatatcctc

SEQ ID NO: 5612 - DNA, 25 bp, Homo sapiens
tataagtcacaggccatgtcatact

SEQ ID NO: 5613 - DNA, 25 bp, Homo sapiens
tcctctttggttcagcgtggctgag

SEQ ID NO: 5614 - DNA, 25 bp, Homo sapiens
ttccgatctctgaagcagcatcctc

SEQ ID NO: 5615 - DNA, 25 bp, Homo sapiens
aaaacatctgctacgtcatcacgca

SEQ ID NO: 5616 - DNA, 25 bp, Homo sapiens
atgtgatcaccggagccttcaaggt

SEQ ID NO: 5617 - DNA, 25 bp, Homo sapiens
caaggaccaggagtaggggcacccg

SEQ ID NO: 5618 - DNA, 25 bp, Homo sapiens
gatgaaggaagccagcggtcccatc

SEQ ID NO: 5619 - DNA, 25 bp, Homo sapiens
gccatgggccgcctcaatgtgaaga

SEQ ID NO: 5620 - DNA, 25 bp, Homo sapiens
gccttcactgtgatcgaccagaacc

SEQ ID NO: 5621 - DNA, 25 bp, Homo sapiens
gctcaagggtgccgaccctgaggat

SEQ ID NO: 5622 - DNA, 25 bp, Homo sapiens
gtcttcctgaccatgttcggggaga

SEQ ID NO: 5623 - DNA, 25 bp, Homo sapiens
tcaagaacatgtgggcggccttccc

SEQ ID NO: 5624 - DNA, 25 bp, Homo sapiens
tctccatgttcgaccagactcagat

SEQ ID NO: 5625 - DNA, 25 bp, Homo sapiens
tgggcggcaacgtcgactacaaaaa

SEQ ID NO: 5626 - DNA, 25 bp, Homo sapiens
aagatgtttgatgccgccaatgctc

SEQ ID NO: 5627 - DNA, 25 bp, Homo sapiens
acaaggtgtccatggatctgcgggc

SEQ ID NO: 5628 - DNA, 25 bp, Homo sapiens
ctcacaatagaggccagcttgctgt

SEQ ID NO: 5629 - DNA, 25 bp, Homo sapiens
ctccgtgggaagttcaagcgcccgc

SEQ ID NO: 5630 - DNA, 25 bp, Homo sapiens
gagctgcacgccaaggtggaggtgg

SEQ ID NO: 5631 - DNA, 25 bp, Homo sapiens
gaggagcgatacgacattgaggcca

SEQ ID NO: 5632 - DNA, 25 bp, Homo sapiens
gctgaaggtgatggacctccgtggg

SEQ ID NO: 5633 - DNA, 25 bp, Homo sapiens
ggaagaacgtggaggccatgtctgg

SEQ ID NO: 5634 - DNA, 25 bp, Homo sapiens
gggccaacctcaagtctgtgaagaa

SEQ ID NO: 5635 - DNA, 25 bp, Homo sapiens
tgggctccaagcacaaggtgtccat

SEQ ID NO: 5636 - DNA, 25 bp, Homo sapiens
ttgaggccaaatgcctccacaacac

SEQ ID NO: 5637 - DNA, 25 bp, Homo sapiens
aagactaccgagtattgcccaggat

SEQ ID NO: 5638 - DNA, 25 bp, Homo sapiens
acctaccttcaccatctgtatatac

SEQ ID NO: 5639 - DNA, 25 bp, Homo sapiens
agccatcccatgttagagcttctca

SEQ ID NO: 5640 - DNA, 25 bp, Homo sapiens
agcccagactctttcagttctctgg

SEQ ID NO: 5641 - DNA, 25 bp, Homo sapiens
atgcccccgtctgacgaatgacagg

SEQ ID NO: 5642 - DNA, 25 bp, Homo sapiens
gaattcttcggagcttgtcttattt

SEQ ID NO: 5643 - DNA, 25 bp, Homo sapiens
gacatttccaccaagtttgagccct

SEQ ID NO: 5644 - DNA, 25 bp, Homo sapiens
gtcctgattacaatgctgtctgtcc

SEQ ID NO: 5645 - DNA, 25 bp, Homo sapiens
taaaccccagttctgaatcacctac

SEQ ID NO: 5646 - DNA, 25 bp, Homo sapiens
tacaacaatccttgcatgctctgtc

SEQ ID NO: 5647 - DNA, 25 bp, Homo sapiens
ttgagccctcaaaatgtcctgatta

SEQ ID NO: 5648 - DNA, 25 bp, Homo sapiens
accaggctgttattcccctggactc

SEQ ID NO: 5649 - DNA, 25 bp, Homo sapiens
cagaagaggcggagagcgcccctcc

SEQ ID NO: 5650 - DNA, 25 bp, Homo sapiens
cctcttgttgccttcgatttcggca

SEQ ID NO: 5651 - DNA, 25 bp, Homo sapiens
gaggtgcgacagggtctggaatctg

SEQ ID NO: 5652 - DNA, 25 bp, Homo sapiens
ggaatctgaccttactctagcagga

SEQ ID NO: 5653 - DNA, 25 bp, Homo sapiens
ggaccaaggtcttcagaggtgcgac

SEQ ID NO: 5654 - DNA, 25 bp, Homo sapiens
ggatggcaaggcgtgaagccaccct

SEQ ID NO: 5655 - DNA, 25 bp, Homo sapiens
gtagactctccctgatagtttagtt

SEQ ID NO: 5656 - DNA, 25 bp, Homo sapiens
taaaaccactaccctcagagagagc

SEQ ID NO: 5657 - DNA, 25 bp, Homo sapiens
tcggcaaagcctgggcaggtgccac

SEQ ID NO: 5658 - DNA, 25 bp, Homo sapiens
ttccctccacctccaagacaggtgg

SEQ ID NO: 5659 - DNA, 25 bp, Homo sapiens
atatgtttttcacagcccgttacaa

SEQ ID NO: 5660 - DNA, 25 bp, Homo sapiens
atgagtagtctaaattccctttcta

SEQ ID NO: 5661 - DNA, 25 bp, Homo sapiens
attacttggaaatcgctacagcttg

SEQ ID NO: 5662 - DNA, 25 bp, Homo sapiens
gagagactgcccatgtgtttagaat

SEQ ID NO: 5663 - DNA, 25 bp, Homo sapiens
gcactttagggtgttctttttctca

SEQ ID NO: 5664 - DNA, 25 bp, Homo sapiens
gctacagcttggactatttttttct

SEQ ID NO: 5665 - DNA, 25 bp, Homo sapiens
taagatatgttcttgctcttttata

SEQ ID NO: 5666 - DNA, 25 bp, Homo sapiens
tagtccatttctgctgctaacaatt

SEQ ID NO: 5667 - DNA, 25 bp, Homo sapiens
tctccatcttccactgttagtgcca

SEQ ID NO: 5668 - DNA, 25 bp, Homo sapiens
ttaaattatgtttccctctgatttt

SEQ ID NO: 5669 - DNA, 25 bp, Homo sapiens
ttccctttctaccattgatttaaat

SEQ ID NO: 5670 - DNA, 25 bp, Homo sapiens
acgacgccctgtatgagtacctgcg

SEQ ID NO: 5671 - DNA, 25 bp, Homo sapiens
acggcaagtggttcgacaagcgctg

SEQ ID NO: 5672 - DNA, 25 bp, Homo sapiens
agaccgagaactgcgcggtcctgtc

SEQ ID NO: 5673 - DNA, 25 bp, Homo sapiens
caacccgatggcggcaagaccgaga

SEQ ID NO: 5674 - DNA, 25 bp, Homo sapiens
cagactggctcggagaacgacgccc

SEQ ID NO: 5675 - DNA, 25 bp, Homo sapiens
cgaggccagcgaggactgcatctcg

SEQ ID NO: 5676 - DNA, 25 bp, Homo sapiens
gcatcgcctacaagaactgggagac

SEQ ID NO: 5677 - DNA, 25 bp, Homo sapiens
gccagttcgggatcgtgtagccggc

SEQ ID NO: 5678 - DNA, 25 bp, Homo sapiens
gccctacatctgccagttcgggatc

SEQ ID NO: 5679 - DNA, 25 bp, Homo sapiens
gcgccagagcgtgggcaacgaggcc

SEQ ID NO: 5680 - DNA, 25 bp, Homo sapiens
tttctggccttcacccagacgaaga

SEQ ID NO: 5681 - DNA, 25 bp, Homo sapiens
catggaaacagccaacgctgacatc

SEQ ID NO: 5682 - DNA, 25 bp, Homo sapiens
ccctactgtttcgagcgtctgggca

SEQ ID NO: 5683 - DNA, 25 bp, Homo sapiens
ccctgctacgactggcaaagatgag

SEQ ID NO: 5684 - DNA, 25 bp, Homo sapiens
cctctgaccatcgccatggaaacag

SEQ ID NO: 5685 - DNA, 25 bp, Homo sapiens
ctgaccatcgccatggaaacagcca

SEQ ID NO: 5686 - DNA, 25 bp, Homo sapiens
gatgtcaactgggtcaatgggggcc

SEQ ID NO: 5687 - DNA, 25 bp, Homo sapiens
gccctactgtttcgagcgtctgggc

SEQ ID NO: 5688 - DNA, 25 bp, Homo sapiens
ggagctgatgtcaactgggtcaatg

SEQ ID NO: 5689 - DNA, 25 bp, Homo sapiens
gggtcaatgggggccaagataatgc

SEQ ID NO: 5690 - DNA, 25 bp, Homo sapiens
gtcaactgggtcaatgggggccaag

SEQ ID NO: 5691 - DNA, 25 bp, Homo sapiens
tcaccctgctacgactggcaaagat

SEQ ID NO: 5692 - DNA, 25 bp, Homo sapiens
aaagccactgtggtgtaccaaggag

SEQ ID NO: 5693 - DNA, 25 bp, Homo sapiens
aactgggaaactggtctgccatgcc

SEQ ID NO: 5694 - DNA, 25 bp, Homo sapiens
atggatattctctggatggcccgga

SEQ ID NO: 5695 - DNA, 25 bp, Homo sapiens
ccattcccatcaagaccagacaatg

SEQ ID NO: 5696 - DNA, 25 bp, Homo sapiens
ctatcctgcaaaaccaacactttat

SEQ ID NO: 5697 - DNA, 25 bp, Homo sapiens
gatacaattacctgcacgacacatg

SEQ ID NO: 5698 - DNA, 25 bp, Homo sapiens
gatgcatccgatgtaaagccatgct

SEQ ID NO: 5699 - DNA, 25 bp, Homo sapiens
gatggcactatcgaagtccccaaat

SEQ ID NO: 5700 - DNA, 25 bp, Homo sapiens
ggaacacagttctctggctttttgg

SEQ ID NO: 5701 - DNA, 25 bp, Homo sapiens
ggtctgccatgccaagttgtaaagc

SEQ ID NO: 5702 - DNA, 25 bp, Homo sapiens
gtccccaaatgcttcaaggaacaca

SEQ ID NO: 5703 - DNA, 25 bp, Homo sapiens
agtatctgtgtttccggtgggtgta

SEQ ID NO: 5704 - DNA, 25 bp, Homo sapiens
atccattcctctcttgtttatagta

SEQ ID NO: 5705 - DNA, 25 bp, Homo sapiens
ctcgggtgatatctagcctgcttgt

SEQ ID NO: 5706 - DNA, 25 bp, Homo sapiens
gagactcacatgctttggttagtat

SEQ ID NO: 5707 - DNA, 25 bp, Homo sapiens
gagggaattgtgttgctcctggagg

SEQ ID NO: 5708 - DNA, 25 bp, Homo sapiens
gatctacttgtgacttgttggcctt

SEQ ID NO: 5709 - DNA, 25 bp, Homo sapiens
gcgactaatgcaatccattcctctc

SEQ ID NO: 5710 - DNA, 25 bp, Homo sapiens
ggcattgctgctttcaaccagcgac

SEQ ID NO: 5711 - DNA, 25 bp, Homo sapiens
tctagcctgcttgtgagctctagca

SEQ ID NO: 5712 - DNA, 25 bp, Homo sapiens
ttccgtggaccaattcatctttcag

SEQ ID NO: 5713 - DNA, 25 bp, Homo sapiens
ttcgcttgtgtttctgtacttacca

SEQ ID NO: 5714 - DNA, 25 bp, Homo sapiens
aagtgtgccttgaattgtacagagc

SEQ ID NO: 5715 - DNA, 25 bp, Homo sapiens
aatggtctaaacttattgtggtaat

SEQ ID NO: 5716 - DNA, 25 bp, Homo sapiens
atgtttgaaatgtgtactacttaat

SEQ ID NO: 5717 - DNA, 25 bp, Homo sapiens
ctaaggctagaattgggggtgatga

SEQ ID NO: 5718 - DNA, 25 bp, Homo sapiens
gaatggagtataagttttccgttgt

SEQ ID NO: 5719 - DNA, 25 bp, Homo sapiens
gatgttatccttcattgtggtgtaa

SEQ ID NO: 5720 - DNA, 25 bp, Homo sapiens
gggagtacaggattcatctaatggg

SEQ ID NO: 5721 - DNA, 25 bp, Homo sapiens
gtacaggatttctttatggttcatg

SEQ ID NO: 5722 - DNA, 25 bp, Homo sapiens
tctacaaaaaatactttccgtacat

SEQ ID NO: 5723 - DNA, 25 bp, Homo sapiens
ttcacctgtgaacccaaataaaatg

SEQ ID NO: 5724 - DNA, 25 bp, Homo sapiens
ttccgtacattagtggttacctaag

SEQ ID NO: 5725 - DNA, 25 bp, Homo sapiens
attatgccagtttctgttctctcac

SEQ ID NO: 5726 - DNA, 25 bp, Homo sapiens
attgctgcctctattatggcacttc

SEQ ID NO: 5727 - DNA, 25 bp, Homo sapiens
cacacttgtaaacctcttttgcact

SEQ ID NO: 5728 - DNA, 25 bp, Homo sapiens
gatgctcgagcacctgtaaacaatt

SEQ ID NO: 5729 - DNA, 25 bp, Homo sapiens
gattaatatgcccttttgccgatgc

SEQ ID NO: 5730 - DNA, 25 bp, Homo sapiens
ggcacttcaattttgcactgtcttt

SEQ ID NO: 5731 - DNA, 25 bp, Homo sapiens
gtaaatgctgccatgttccaaaccc

SEQ ID NO: 5732 - DNA, 25 bp, Homo sapiens
gtgtttagagctgtgcaccctagaa

SEQ ID NO: 5733 - DNA, 25 bp, Homo sapiens
tactgatgtgactcggttttgtcgc

SEQ ID NO: 5734 - DNA, 25 bp, Homo sapiens
ttttgtcgcagctttgctttgttta

SEQ ID NO: 5735 - DNA, 25 bp, Homo sapiens
tttttgtgcactacatactcttcag

SEQ ID NO: 5736 - DNA, 25 bp, Homo sapiens
aaaaccttacttagtgactggaatg

SEQ ID NO: 5737 - DNA, 25 bp, Homo sapiens
atagcaacctgtattgttagtattt

SEQ ID NO: 5738 - DNA, 25 bp, Homo sapiens
caaactctcaattacgccatggtaa

SEQ ID NO: 5739 - DNA, 25 bp, Homo sapiens
ccactgggcgcggccagataagttt

SEQ ID NO: 5740 - DNA, 25 bp, Homo sapiens
gaaacatagccattgattgatcaga

SEQ ID NO: 5741 - DNA, 25 bp, Homo sapiens
gactggaatggtatatgctccctcc

SEQ ID NO: 5742 - DNA, 25 bp, Homo sapiens
gtaagacaagagtaatagcaacctg

SEQ ID NO: 5743 - DNA, 25 bp, Homo sapiens
tacgccatggtaattcagtcactaa

SEQ ID NO: 5744 - DNA, 25 bp, Homo sapiens
tcttgctttagcattctgagaaatg

SEQ ID NO: 5745 - DNA, 25 bp, Homo sapiens
tgattaaaggtaatccttactttct

SEQ ID NO: 5746 - DNA, 25 bp, Homo sapiens
ttttaatcaggtaccttatgtatta

SEQ ID NO: 5747 - DNA, 25 bp, Homo sapiens
aaaattgcattagcagccatagctg

SEQ ID NO: 5748 - DNA, 25 bp, Homo sapiens
aactttcaattgtcactttttatgc

SEQ ID NO: 5749 - DNA, 25 bp, Homo sapiens
agcacctggaagcagtaacatgcaa

SEQ ID NO: 5750 - DNA, 25 bp, Homo sapiens
agccataaatgatgagtcggtcctc

SEQ ID NO: 5751 - DNA, 25 bp, Homo sapiens
attacaggatatcacattggagtca

SEQ ID NO: 5752 - DNA, 25 bp, Homo sapiens
atttcaaaatttctgcattcacgga

SEQ ID NO: 5753 - DNA, 25 bp, Homo sapiens
caatggaccctttttgttatgatgg

SEQ ID NO: 5754 - DNA, 25 bp, Homo sapiens
catagctgcctttatgtctgctgtg

SEQ ID NO: 5755 - DNA, 25 bp, Homo sapiens
gctgttgctgttattacagtccagc

SEQ ID NO: 5756 - DNA, 25 bp, Homo sapiens
tcactttttatgctatttctgtata

SEQ ID NO: 5757 - DNA, 25 bp, Homo sapiens
tggagtcactgccaagtcatagcca

SEQ ID NO: 5758 - DNA, 25 bp, Homo sapiens
aaatctattctaacgcaaaaccact

SEQ ID NO: 5759 - DNA, 25 bp, Homo sapiens
atctgctccttttcgagttgtttga

SEQ ID NO: 5760 - DNA, 25 bp, Homo sapiens
cttggtcgccttgtgtgatgtagac

SEQ ID NO: 5761 - DNA, 25 bp, Homo sapiens
gatttgtttggtcattagctcttaa

SEQ ID NO: 5762 - DNA, 25 bp, Homo sapiens
ggaacgtagcaatatctgctccttt

SEQ ID NO: 5763 - DNA, 25 bp, Homo sapiens
ggctattttttcagtgtatatccac

SEQ ID NO: 5764 - DNA, 25 bp, Homo sapiens
ggctgcatgtaaatgggttgcctta

SEQ ID NO: 5765 - DNA, 25 bp, Homo sapiens
ggggatgtacatattctctgaaact

SEQ ID NO: 5766 - DNA, 25 bp, Homo sapiens
tcactccctgagtttagtatggctg

SEQ ID NO: 5767 - DNA, 25 bp, Homo sapiens
tgtgttggaagtgtccttggtcgcc

SEQ ID NO: 5768 - DNA, 25 bp, Homo sapiens
tttttgatgtacccacactgttctc

SEQ ID NO: 5769 - DNA, 25 bp, Homo sapiens
ctccagctgtcagcctggttttcgt

SEQ ID NO: 5770 - DNA, 25 bp, Homo sapiens
cttcgccatgttatcagccagacag

SEQ ID NO: 5771 - DNA, 25 bp, Homo sapiens
gaggttggcaggatgctactacccc

SEQ ID NO: 5772 - DNA, 25 bp, Homo sapiens
gatacagtgatggactcgcagccag

SEQ ID NO: 5773 - DNA, 25 bp, Homo sapiens
gcagccagtcagatgtacagtccgc

SEQ ID NO: 5774 - DNA, 25 bp, Homo sapiens
gccctctctcatatcactgaaggat

SEQ ID NO: 5775 - DNA, 25 bp, Homo sapiens
ggatgctatttcagccaatctggac

SEQ ID NO: 5776 - DNA, 25 bp, Homo sapiens
tacagtccgcagggcatcagtgcta

SEQ ID NO: 5777 - DNA, 25 bp, Homo sapiens
tgaccctctgccccagttggggcag

SEQ ID NO: 5778 - DNA, 25 bp, Homo sapiens
tggacacttctttatactctcttcc

SEQ ID NO: 5779 - DNA, 25 bp, Homo sapiens
ttctctcccaagctgaagcggtcag

SEQ ID NO: 5780 - DNA, 25 bp, Homo sapiens
aaaaacagctcctctatatttccac

SEQ ID NO: 5781 - DNA, 25 bp, Homo sapiens
agggcctgatttatctagctgtcca

SEQ ID NO: 5782 - DNA, 25 bp, Homo sapiens
cacacagtcacgcaagctagttccc

SEQ ID NO: 5783 - DNA, 25 bp, Homo sapiens
catgcattgctcttattctgtctgg

SEQ ID NO: 5784 - DNA, 25 bp, Homo sapiens
gatagcacgactacactgaggcacc

SEQ ID NO: 5785 - DNA, 25 bp, Homo sapiens
gatgggcagctaagcagtcttctct

SEQ ID NO: 5786 - DNA, 25 bp, Homo sapiens
gatggggcatattcatctaccccca

SEQ ID NO: 5787 - DNA, 25 bp, Homo sapiens
gtcttctcttctgcctttatgagat

SEQ ID NO: 5788 - DNA, 25 bp, Homo sapiens
gttcccatgactcctggatctatgt

SEQ ID NO: 5789 - DNA, 25 bp, Homo sapiens
tatacatagttgcttctttcctttc

SEQ ID NO: 5790 - DNA, 25 bp, Homo sapiens
tttccacctctttctatttatgcaa

SEQ ID NO: 5791 - DNA, 25 bp, Homo sapiens
aacagagtaggctttgccactgccg

SEQ ID NO: 5792 - DNA, 25 bp, Homo sapiens
agtacatgagtgctcttctgcaggc

SEQ ID NO: 5793 - DNA, 25 bp, Homo sapiens
cccctgtggatcctcggggatgtct

SEQ ID NO: 5794 - DNA, 25 bp, Homo sapiens
cctactattccgtctacgacttggg

SEQ ID NO: 5795 - DNA, 25 bp, Homo sapiens
ctaactgtgccccagcagtacatga

SEQ ID NO: 5796 - DNA, 25 bp, Homo sapiens
ctactgcaccgtgggagtcgagccc

SEQ ID NO: 5797 - DNA, 25 bp, Homo sapiens
ctgcaccctcctagggcattgtatc

SEQ ID NO: 5798 - DNA, 25 bp, Homo sapiens
gagtatggacagtttctcgtgaact

SEQ ID NO: 5799 - DNA, 25 bp, Homo sapiens
tccggctggtgttctgagggttgcc

SEQ ID NO: 5800 - DNA, 25 bp, Homo sapiens
ttcctcctatatcctcagtaacaac

SEQ ID NO: 5801 - DNA, 25 bp, Homo sapiens
ttgccaggccatcgtggacacaggc

SEQ ID NO: 5802 - DNA, 25 bp, Homo sapiens
accaagagagatgtctccgggccct

SEQ ID NO: 5803 - DNA, 25 bp, Homo sapiens
agcactgctagtttacttgtctctc

SEQ ID NO: 5804 - DNA, 25 bp, Homo sapiens
atagtgtgtggggttggagctctgg

SEQ ID NO: 5805 - DNA, 25 bp, Homo sapiens
cgcccacgtgctagctccgtgggcc

SEQ ID NO: 5806 - DNA, 25 bp, Homo sapiens
ctctggcacccggggaggtagcatt

SEQ ID NO: 5807 - DNA, 25 bp, Homo sapiens
cttagagtcatctctagttccccac

SEQ ID NO: 5808 - DNA, 25 bp, Homo sapiens
gatggtacagatgttcctgccttag

SEQ ID NO: 5809 - DNA, 25 bp, Homo sapiens
gtagcatttccctgcagatggtaca

SEQ ID NO: 5810 - DNA, 25 bp, Homo sapiens
taccctgtggggatgtttcatactg

SEQ ID NO: 5811 - DNA, 25 bp, Homo sapiens
tcctctttgatgaatgtaccctgtg

SEQ ID NO: 5812 - DNA, 25 bp, Homo sapiens
tggccttgggtgacaaattcctctt

SEQ ID NO: 5813 - DNA, 25 bp, Homo sapiens
aagtcatggacttttctgggaaatg

SEQ ID NO: 5814 - DNA, 25 bp, Homo sapiens
acctgctaatagcaccatcgtcact

SEQ ID NO: 5815 - DNA, 25 bp, Homo sapiens
acgtgtaccttgggaactggctcac

SEQ ID NO: 5816 - DNA, 25 bp, Homo sapiens
agcaccatcgtcactattaagcaga

SEQ ID NO: 5817 - DNA, 25 bp, Homo sapiens
gagactgagttgttagcaggtgtgc

SEQ ID NO: 5818 - DNA, 25 bp, Homo sapiens
gcacccagccttttaccatgtgggt

SEQ ID NO: 5819 - DNA, 25 bp, Homo sapiens
gcagacatttcagttggtagaatcc

SEQ ID NO: 5820 - DNA, 25 bp, Homo sapiens
gcaggtgtgcttagctcttgatagt

SEQ ID NO: 5821 - DNA, 25 bp, Homo sapiens
gctcttgatagtgaacgtgtacctt

SEQ ID NO: 5822 - DNA, 25 bp, Homo sapiens
taaaagcgtccataagccaccattc

SEQ ID NO: 5823 - DNA, 25 bp, Homo sapiens
tttgacatattttctttgcccactt

SEQ ID NO: 5824 - DNA, 25 bp, Homo sapiens
aatgttccccaaataattgttgtgt

SEQ ID NO: 5825 - DNA, 25 bp, Homo sapiens
agcaatttgttgctgcttgtcaccc

SEQ ID NO: 5826 - DNA, 25 bp, Homo sapiens
caagtccccgtggaggttctgtatt

SEQ ID NO: 5827 - DNA, 25 bp, Homo sapiens
caataactttgtctcgttcctgttg

SEQ ID NO: 5828 - DNA, 25 bp, Homo sapiens
gaaacagtgcgttgagtgtacagat

SEQ ID NO: 5829 - DNA, 25 bp, Homo sapiens
gactctttgaaatgacatgttccct

SEQ ID NO: 5830 - DNA, 25 bp, Homo sapiens
gggtctgtaaatactggtgcacttc

SEQ ID NO: 5831 - DNA, 25 bp, Homo sapiens
gtgcacttcttacgacttttttgag

SEQ ID NO: 5832 - DNA, 25 bp, Homo sapiens
gttcctgttgggctgaaccctaagg

SEQ ID NO: 5833 - DNA, 25 bp, Homo sapiens
tgttcccttaaggtactgaagcttt

SEQ ID NO: 5834 - DNA, 25 bp, Homo sapiens
ttggaattgaactctctgcctgtaa

SEQ ID NO: 5835 - DNA, 25 bp, Homo sapiens
aagtggtctgtaggtgagcacccag

SEQ ID NO: 5836 - DNA, 25 bp, Homo sapiens
aatggactcggagccgagggcctcc

SEQ ID NO: 5837 - DNA, 25 bp, Homo sapiens
acgagggcctggacattgaccagac

SEQ ID NO: 5838 - DNA, 25 bp, Homo sapiens
agagcttgggaagggccatggaccc

SEQ ID NO: 5839 - DNA, 25 bp, Homo sapiens
ccagccttctgggggtgctatgagg

SEQ ID NO: 5840 - DNA, 25 bp, Homo sapiens
gagccacaggaacatcattcctctc

SEQ ID NO: 5841 - DNA, 25 bp, Homo sapiens
ggccaggagtgagagccaggtcgcc

SEQ ID NO: 5842 - DNA, 25 bp, Homo sapiens
gggtgctatgaggtgatccgtcccc

SEQ ID NO: 5843 - DNA, 25 bp, Homo sapiens
tccagagcccgcaaatggactcgga

SEQ ID NO: 5844 - DNA, 25 bp, Homo sapiens
tgaccagacagccacctatgaggac

SEQ ID NO: 5845 - DNA, 25 bp, Homo sapiens
tgaggacatagtgacgctgcggaca

SEQ ID NO: 5846 - DNA, 25 bp, Homo sapiens
aagctcctgcgtctgtttttaaaga

SEQ ID NO: 5847 - DNA, 25 bp, Homo sapiens
aataacttgtcctatgtcaatttgt

SEQ ID NO: 5848 - DNA, 25 bp, Homo sapiens
aataatgttctgtcacgtgaaatat

SEQ ID NO: 5849 - DNA, 25 bp, Homo sapiens
atactccatacataacttgatatag

SEQ ID NO: 5850 - DNA, 25 bp, Homo sapiens
atgttgttaaacacgtgtcgataat

SEQ ID NO: 5851 - DNA, 25 bp, Homo sapiens
gaaacacttctcatcatattgtatg

SEQ ID NO: 5852 - DNA, 25 bp, Homo sapiens
gaaggaggacggttaacttgtatat

SEQ ID NO: 5853 - DNA, 25 bp, Homo sapiens
gatgttgccacctgttaaaatgtac

SEQ ID NO: 5854 - DNA, 25 bp, Homo sapiens
gattacataatcaaagctacctgtg

SEQ ID NO: 5855 - DNA, 25 bp, Homo sapiens
gctacctgtggtgatgttgccacct

SEQ ID NO: 5856 - DNA, 25 bp, Homo sapiens
tgtatattccaccattcacatttga

SEQ ID NO: 5857 - DNA, 25 bp, Homo sapiens
agttgcagtctcagaaagccttcca

SEQ ID NO: 5858 - DNA, 25 bp, Homo sapiens
atttcaaaagtgatctgtcccctct

SEQ ID NO: 5859 - DNA, 25 bp, Homo sapiens
cccccatcccaaatgatcttgagat

SEQ ID NO: 5860 - DNA, 25 bp, Homo sapiens
cccctctgccctgtatataatacta

SEQ ID NO: 5861 - DNA, 25 bp, Homo sapiens
ccctctcccctcatggagaaacatc

SEQ ID NO: 5862 - DNA, 25 bp, Homo sapiens
ctaactccagtctcctgacattaag

SEQ ID NO: 5863 - DNA, 25 bp, Homo sapiens
gacattaagacacacctctggatcc

SEQ ID NO: 5864 - DNA, 25 bp, Homo sapiens
gaggcctggacacttatggggacag

SEQ ID NO: 5865 - DNA, 25 bp, Homo sapiens
ggggacagcataccttggactgact

SEQ ID NO: 5866 - DNA, 25 bp, Homo sapiens
gtcagagtaacatgccagcttcctg

SEQ ID NO: 5867 - DNA, 25 bp, Homo sapiens
tggactgactaccagctaactccag

SEQ ID NO: 5868 - DNA, 25 bp, Homo sapiens
aaggctgagatgaagtggactgagt

SEQ ID NO: 5869 - DNA, 25 bp, Homo sapiens
aattgagccaggtttggtccgtggt

SEQ ID NO: 5870 - DNA, 25 bp, Homo sapiens
acccagcaggggacaggcaatcagg

SEQ ID NO: 5871 - DNA, 25 bp, Homo sapiens
cacccttaaccctgtgttcaggcac

SEQ ID NO: 5872 - DNA, 25 bp, Homo sapiens
gaagtggactgagtagaactggagg

SEQ ID NO: 5873 - DNA, 25 bp, Homo sapiens
gacaagagttgacgtgagttcctgg

SEQ ID NO: 5874 - DNA, 25 bp, Homo sapiens
gagttcctgggagtttccagagatg

SEQ ID NO: 5875 - DNA, 25 bp, Homo sapiens
ggagggcccagtaaaggctgagatg

SEQ ID NO: 5876 - DNA, 25 bp, Homo sapiens
ggcacatcctaacgcaagtttgacc

SEQ ID NO: 5877 - DNA, 25 bp, Homo sapiens
gtttgaccatgtatgtttgcacccc

SEQ ID NO: 5878 - DNA, 25 bp, Homo sapiens
ttcctgaggcacatcctaacgcaag

SEQ ID NO: 5879 - DNA, 25 bp, Homo sapiens
aaatgtaaagccatctgtccggcgt

SEQ ID NO: 5880 - DNA, 25 bp, Homo sapiens
agaaggggacaggcagtccgcggtc

SEQ ID NO: 5881 - DNA, 25 bp, Homo sapiens
caatcaactcaaggtacgcccactg

SEQ ID NO: 5882 - DNA, 25 bp, Homo sapiens
caccagggtgacaaggggtcctcgt

SEQ ID NO: 5883 - DNA, 25 bp, Homo sapiens
cagggccagtcctaaggagctgagg

SEQ ID NO: 5884 - DNA, 25 bp, Homo sapiens
cccccaacatgaccacacgtgggtg

SEQ ID NO: 5885 - DNA, 25 bp, Homo sapiens
ggagctgagggtctgaggacgcagg

SEQ ID NO: 5886 - DNA, 25 bp, Homo sapiens
gggtctgaggacgcagggagggtgg

SEQ ID NO: 5887 - DNA, 25 bp, Homo sapiens
gtccgcggtctctggacaatcaact

SEQ ID NO: 5888 - DNA, 25 bp, Homo sapiens
gtggaggtgtcctgaggctgatgga

SEQ ID NO: 5889 - DNA, 25 bp, Homo sapiens
tgaggctgatggacagtgaccgcca

SEQ ID NO: 5890 - DNA, 25 bp, Homo sapiens
aaatgtcaccaaatactgtgggcta

SEQ ID NO: 5891 - DNA, 25 bp, Homo sapiens
aatgtcttcctgagagaatttccta

SEQ ID NO: 5892 - DNA, 25 bp, Homo sapiens
atgaccagatcactttactgcttat

SEQ ID NO: 5893 - DNA, 25 bp, Homo sapiens
ctagcattttctgaccttacaataa

SEQ ID NO: 5894 - DNA, 25 bp, Homo sapiens
gaatttcctaattttgtagttcata

SEQ ID NO: 5895 - DNA, 25 bp, Homo sapiens
gattatacttagctgcttttatctg

SEQ ID NO: 5896 - DNA, 25 bp, Homo sapiens
gctgcttttatctgtagtgtgggtg

SEQ ID NO: 5897 - DNA, 25 bp, Homo sapiens
gtgcattaaattcccttctaattct

SEQ ID NO: 5898 - DNA, 25 bp, Homo sapiens
gtgtgggtgactttttataactatt

SEQ ID NO: 5899 - DNA, 25 bp, Homo sapiens
tactgtgggctatatttctcaatga

SEQ ID NO: 5900 - DNA, 25 bp, Homo sapiens
tatgttttataatgtcttcctgaga

SEQ ID NO: 5901 - DNA, 25 bp, Homo sapiens
aattcttgggttcagtctcatgcca

SEQ ID NO: 5902 - DNA, 25 bp, Homo sapiens
actcctagtacctaatgcagtgcct

SEQ ID NO: 5903 - DNA, 25 bp, Homo sapiens
attaccatgcactggcaattccaaa

SEQ ID NO: 5904 - DNA, 25 bp, Homo sapiens
gccctcttcttatgtatttactctt

SEQ ID NO: 5905 - DNA, 25 bp, Homo sapiens
ggctggtcttaactgactgcttttt

SEQ ID NO: 5906 - DNA, 25 bp, Homo sapiens
gggtagtaggagcagttcaccctgg

SEQ ID NO: 5907 - DNA, 25 bp, Homo sapiens
gtctcatgccatatttactcctagt

SEQ ID NO: 5908 - DNA, 25 bp, Homo sapiens
gtggcattccatagctgagggtagt

SEQ ID NO: 5909 - DNA, 25 bp, Homo sapiens
tactcttcaatttcttatctatacc

SEQ ID NO: 5910 - DNA, 25 bp, Homo sapiens
tatacctctcactcaattgttaatt

SEQ ID NO: 5911 - DNA, 25 bp, Homo sapiens
tcaccaattttgaactttgaccctt

SEQ ID NO: 5912 - DNA, 25 bp, Homo sapiens
aacacgcaggactacatctggcaca

SEQ ID NO: 5913 - DNA, 25 bp, Homo sapiens
acaaggggatgcgctgcgagtccat

SEQ ID NO: 5914 - DNA, 25 bp, Homo sapiens
actccatgtcgcccaaacttgaggg

SEQ ID NO: 5915 - DNA, 25 bp, Homo sapiens
agctccacaatgataacttctccct

SEQ ID NO: 5916 - DNA, 25 bp, Homo sapiens
caggaggttctcaagtcctgcctga

SEQ ID NO: 5917 - DNA, 25 bp, Homo sapiens
cctcttcccaagttactgtcacaat

SEQ ID NO: 5918 - DNA, 25 bp, Homo sapiens
gaataccaagctgcgtaggaccaac

SEQ ID NO: 5919 - DNA, 25 bp, Homo sapiens
gccttctgcaggtgcaacacgcagg

SEQ ID NO: 5920 - DNA, 25 bp, Homo sapiens
ggctctcacccaaatgatgatccta

SEQ ID NO: 5921 - DNA, 25 bp, Homo sapiens
ggtgaccaggctgacttggatgtga

SEQ ID NO: 5922 - DNA, 25 bp, Homo sapiens
tccatcatcaccgacttccaggtga

SEQ ID NO: 5923 - DNA, 25 bp, Homo sapiens
accactaatacttctcactgaagct

SEQ ID NO: 5924 - DNA, 25 bp, Homo sapiens
agaacattgctgctccttatttatt

SEQ ID NO: 5925 - DNA, 25 bp, Homo sapiens
atttgtgcttacatgcactcctggc

SEQ ID NO: 5926 - DNA, 25 bp, Homo sapiens
catgcactcctggcatagtcctatt

SEQ ID NO: 5927 - DNA, 25 bp, Homo sapiens
gacgtggtgttttacatggtgactc

SEQ ID NO: 5928 - DNA, 25 bp, Homo sapiens
gagaggactgtattctctctgctgc

SEQ ID NO: 5929 - DNA, 25 bp, Homo sapiens
gcaattacagtatgccagttccact

SEQ ID NO: 5930 - DNA, 25 bp, Homo sapiens
ggggttatgggttaagttgctgcct

SEQ ID NO: 5931 - DNA, 25 bp, Homo sapiens
tagtgtgctgcatggaacgtattta

SEQ ID NO: 5932 - DNA, 25 bp, Homo sapiens
tctctctgctgctgttgaggttata

SEQ ID NO: 5933 - DNA, 25 bp, Homo sapiens
ttgggtgcagatgtggtgttcctca

SEQ ID NO: 5934 - DNA, 25 bp, Homo sapiens
aacactgtcactttcagagctcggt

SEQ ID NO: 5935 - DNA, 25 bp, Homo sapiens
aacggccatttgggatgccagggtg

SEQ ID NO: 5936 - DNA, 25 bp, Homo sapiens
actctggcgcactctagtggacagg

SEQ ID NO: 5937 - DNA, 25 bp, Homo sapiens
cagaccgctggaaaacactgtcact

SEQ ID NO: 5938 - DNA, 25 bp, Homo sapiens
ctaggggtgcagggacttccctttg

SEQ ID NO: 5939 - DNA, 25 bp, Homo sapiens
ctgcatcttaaccttttgtatttat

SEQ ID NO: 5940 - DNA, 25 bp, Homo sapiens
gaacgccttccaggaacctgtggac

SEQ ID NO: 5941 - DNA, 25 bp, Homo sapiens
gagacttgggtgggtgggcatctct

SEQ ID NO: 5942 - DNA, 25 bp, Homo sapiens
gcggacgagagaaatcgcggcccac

SEQ ID NO: 5943 - DNA, 25 bp, Homo sapiens
gggctagtagagccttcaggcgcct

SEQ ID NO: 5944 - DNA, 25 bp, Homo sapiens
tgacgcacaccctgggatggggcta

SEQ ID NO: 5945 - DNA, 25 bp, Homo sapiens
aacacaacatctttttctactcgag

SEQ ID NO: 5946 - DNA, 25 bp, Homo sapiens
aagaaccttttgagtgccttacaca

SEQ ID NO: 5947 - DNA, 25 bp, Homo sapiens
agaatttcccaaagcagtgcatgct

SEQ ID NO: 5948 - DNA, 25 bp, Homo sapiens
agtgccttacacaatggttttcttg

SEQ ID NO: 5949 - DNA, 25 bp, Homo sapiens
atcttcctcgcagaattcacagaat

SEQ ID NO: 5950 - DNA, 25 bp, Homo sapiens
gagttacagacaaagcgtggtggac

SEQ ID NO: 5951 - DNA, 25 bp, Homo sapiens
gtggtgagaggcatccagtatcttg

SEQ ID NO: 5952 - DNA, 25 bp, Homo sapiens
gtttctgcagccactattgttagtc

SEQ ID NO: 5953 - DNA, 25 bp, Homo sapiens
tcagtgtgactgatctctcgtgatt

SEQ ID NO: 5954 - DNA, 25 bp, Homo sapiens
tcccttacgtgagtcctggcatggg

SEQ ID NO: 5955 - DNA, 25 bp, Homo sapiens
tcttgaagacttttctttcagccaa

SEQ ID NO: 5956 - DNA, 25 bp, Homo sapiens
aaggcttcgtatcttaaggcagagg

SEQ ID NO: 5957 - DNA, 25 bp, Homo sapiens
catggccgacgtagctatgaagcag

SEQ ID NO: 5958 - DNA, 25 bp, Homo sapiens
gcaggaactgagatatcccgccatc

SEQ ID NO: 5959 - DNA, 25 bp, Homo sapiens
ggagcttatgctgactgggatgtgg

SEQ ID NO: 5960 - DNA, 25 bp, Homo sapiens
ggagtttgttgacctcatgaacagc

SEQ ID NO: 5961 - DNA, 25 bp, Homo sapiens
ggatgtggtcatgtcaaggcttcgt

SEQ ID NO: 5962 - DNA, 25 bp, Homo sapiens
ggcacattattcacagaccatgatc

SEQ ID NO: 5963 - DNA, 25 bp, Homo sapiens
gtgattacttttgataactggcgct

SEQ ID NO: 5964 - DNA, 25 bp, Homo sapiens
taactggcgcttacttcatggccga

SEQ ID NO: 5965 - DNA, 25 bp, Homo sapiens
tatcccgccatctagaaggagctta

SEQ ID NO: 5966 - DNA, 25 bp, Homo sapiens
ttagatgtttcaccactcttttgca

SEQ ID NO: 5967 - DNA, 25 bp, Homo sapiens
aaattgggcacagagttcgcattgg

SEQ ID NO: 5968 - DNA, 25 bp, Homo sapiens
attactagtgatcatgtttttttcc

SEQ ID NO: 5969 - DNA, 25 bp, Homo sapiens
ctgggggcactggaagcacaatacg

SEQ ID NO: 5970 - DNA, 25 bp, Homo sapiens
gaggggaaattaactagtccagcct

SEQ ID NO: 5971 - DNA, 25 bp, Homo sapiens
gagttcgcattggcgcaatatttat

SEQ ID NO: 5972 - DNA, 25 bp, Homo sapiens
gtcctttgcaacattctcataaaat

SEQ ID NO: 5973 - DNA, 25 bp, Homo sapiens
taaccttgaagtctatatccgtgat

SEQ ID NO: 5974 - DNA, 25 bp, Homo sapiens
tacgcttaagtgtgtggcccatgaa

SEQ ID NO: 5975 - DNA, 25 bp, Homo sapiens
tacggtgaccaatcttgctttcatt

SEQ ID NO: 5976 - DNA, 25 bp, Homo sapiens
tagtccagcctaaaatgcttctttt

SEQ ID NO: 5977 - DNA, 25 bp, Homo sapiens
ttcctcttctagttgtgccattact

SEQ ID NO: 5978 - DNA, 25 bp, Homo sapiens
aaagaacgggcccacagtacagcct

SEQ ID NO: 5979 - DNA, 25 bp, Homo sapiens
atttgatagctgtttctgggtattt

SEQ ID NO: 5980 - DNA, 25 bp, Homo sapiens
gatttttttcatgtgatcttttcca

SEQ ID NO: 5981 - DNA, 25 bp, Homo sapiens
gtatgatgatgtctcttacttctac

SEQ ID NO: 5982 - DNA, 25 bp, Homo sapiens
gtcaaaccatgactcgcacatggca

SEQ ID NO: 5983 - DNA, 25 bp, Homo sapiens
gtgacctgtttactgtctctttaga

SEQ ID NO: 5984 - DNA, 25 bp, Homo sapiens
tacaggcggctattgcagacggcta

SEQ ID NO: 5985 - DNA, 25 bp, Homo sapiens
tcaccatgtgtgactgtcttctgtt

SEQ ID NO: 5986 - DNA, 25 bp, Homo sapiens
ttacttctacaggttccttgagcac

SEQ ID NO: 5987 - DNA, 25 bp, Homo sapiens
ttatcatttgtcttacaggcggcta

SEQ ID NO: 5988 - DNA, 25 bp, Homo sapiens
ttccaagcttcaacttaacttaact

SEQ ID NO: 5989 - DNA, 25 bp, Homo sapiens
ccaagcaacaaagtcccgagcaatg

SEQ ID NO: 5990 - DNA, 25 bp, Homo sapiens
cctgcatctggttggtctttattga

SEQ ID NO: 5991 - DNA, 25 bp, Homo sapiens
cgagcaatgaagtcatccactcctg

SEQ ID NO: 5992 - DNA, 25 bp, Homo sapiens
cgccatcaccgagcgcttgatgtgc

SEQ ID NO: 5993 - DNA, 25 bp, Homo sapiens
ctcgcgcgtttgcggcaaccgcaag

SEQ ID NO: 5994 - DNA, 25 bp, Homo sapiens
gaaggtcagggtcacccaagcaaca

SEQ ID NO: 5995 - DNA, 25 bp, Homo sapiens
gatgtgcgcggagagcaatcgccgg

SEQ ID NO: 5996 - DNA, 25 bp, Homo sapiens
gcaaccgcaagaagcccgggatcta

SEQ ID NO: 5997 - DNA, 25 bp, Homo sapiens
gcaagaagcccgggatctacacccg

SEQ ID NO: 5998 - DNA, 25 bp, Homo sapiens
gcacctactatatgcagaaggggag

SEQ ID NO: 5999 - DNA, 25 bp, Homo sapiens
gtgccggggcctgaaggtcagggtc

SEQ ID NO: 6000 - DNA, 25 bp, Homo sapiens
aaggctgcctttgacatgtttgatg

SEQ ID NO: 6001 - DNA, 25 bp, Homo sapiens
ccaggtcctacctcagcgaagagat

SEQ ID NO: 6002 - DNA, 25 bp, Homo sapiens
ccgcattgacttcgacgagttcctg

SEQ ID NO: 6003 - DNA, 25 bp, Homo sapiens
ctccggggagcacgtgactgacgag

SEQ ID NO: 6004 - DNA, 25 bp, Homo sapiens
gaatgcagacggctacatcgacccg

SEQ ID NO: 6005 - DNA, 25 bp, Homo sapiens
gagatgatcgctgagttcaaggctg

SEQ ID NO: 6006 - DNA, 25 bp, Homo sapiens
gcttccgcatcttcgacaggaatgc

SEQ ID NO: 6007 - DNA, 25 bp, Homo sapiens
ggcaccatcgacttcgaggagttct

SEQ ID NO: 6008 - DNA, 25 bp, Homo sapiens
ggtggggacatcagcgtcaaggagt

SEQ ID NO: 6009 - DNA, 25 bp, Homo sapiens
gtccctagggtgtgggagactccgc

SEQ ID NO: 6010 - DNA, 25 bp, Homo sapiens
taaggagtggacagtcgcctctacc

SEQ ID NO: 6011 - DNA, 25 bp, Homo sapiens
cacgctccggctgctagtaggagcc

SEQ ID NO: 6012 - DNA, 25 bp, Homo sapiens
cccctaccctactctgatgtataga

SEQ ID NO: 6013 - DNA, 25 bp, Homo sapiens
gcctagagaatgctgcagtctgcac

SEQ ID NO: 6014 - DNA, 25 bp, Homo sapiens
gctgcagtctgcacattagacgctt

SEQ ID NO: 6015 - DNA, 25 bp, Homo sapiens
ggcccaaggaagctgggcgcagggc

SEQ ID NO: 6016 - DNA, 25 bp, Homo sapiens
ggtctccacacgatgcctagagaat

SEQ ID NO: 6017 - DNA, 25 bp, Homo sapiens
taggagccgttaggggaggagtttg

SEQ ID NO: 6018 - DNA, 25 bp, Homo sapiens
tatgggagagaatcccctaccctac

SEQ ID NO: 6019 - DNA, 25 bp, Homo sapiens
tctgatgtatagaccattctccctt

SEQ ID NO: 6020 - DNA, 25 bp, Homo sapiens
tgcacattagacgctttttagaagt

SEQ ID NO: 6021 - DNA, 25 bp, Homo sapiens
ttcggtgacggcccaaggaagctgg

SEQ ID NO: 6022 - DNA, 25 bp, Homo sapiens
acaacatgttctgtgtgggcttcct

SEQ ID NO: 6023 - DNA, 25 bp, Homo sapiens
aggcctggagtctacaccaaggtct

SEQ ID NO: 6024 - DNA, 25 bp, Homo sapiens
atgacatcctgctgatcaagctctc

SEQ ID NO: 6025 - DNA, 25 bp, Homo sapiens
caacactctgagttctggtgccgac

SEQ ID NO: 6026 - DNA, 25 bp, Homo sapiens
caatgcggccaagatcatccgccac

SEQ ID NO: 6027 - DNA, 25 bp, Homo sapiens
caccccaaatacaacagccggactc

SEQ ID NO: 6028 - DNA, 25 bp, Homo sapiens
ctcctggggctatggctgtgcccag

SEQ ID NO: 6029 - DNA, 25 bp, Homo sapiens
gaagcctcctaccctggaaagatta

SEQ ID NO: 6030 - DNA, 25 bp, Homo sapiens
gagagcacaacatcgaagtcctgga

SEQ ID NO: 6031 - DNA, 25 bp, Homo sapiens
taaggacaccatagctgccaacagc

SEQ ID NO: 6032 - DNA, 25 bp, Homo sapiens
tacccagacgagctgcagtgcctgg

SEQ ID NO: 6033 - DNA, 25 bp, Homo sapiens
cggaaggaactgacacattctctca

SEQ ID NO: 6034 - DNA, 25 bp, Homo sapiens
gaacatgcagactccttttcaatat

SEQ ID NO: 6035 - DNA, 25 bp, Homo sapiens
gatattctatatctagcggccttta

SEQ ID NO: 6036 - DNA, 25 bp, Homo sapiens
gcactgtgtgtcgatgcaatcttcg

SEQ ID NO: 6037 - DNA, 25 bp, Homo sapiens
ggaatctgtcaagagcaggtatttc

SEQ ID NO: 6038 - DNA, 25 bp, Homo sapiens
gtatagcagcacatcagaagtcgga

SEQ ID NO: 6039 - DNA, 25 bp, Homo sapiens
gtcgatgcaatcttcgctagcacaa

SEQ ID NO: 6040 - DNA, 25 bp, Homo sapiens
taaggcttagttgtcctttctattt

SEQ ID NO: 6041 - DNA, 25 bp, Homo sapiens
tatctagcggcctttatatgcaaat

SEQ ID NO: 6042 - DNA, 25 bp, Homo sapiens
tattgtcgctaatagtcatttctgt

SEQ ID NO: 6043 - DNA, 25 bp, Homo sapiens
tctatttaaataccccaagttgtct

SEQ ID NO: 6044 - DNA, 25 bp, Homo sapiens
agaaatccacattcttacacaagaa

SEQ ID NO: 6045 - DNA, 25 bp, Homo sapiens
attttgattgtcacactgggtcggg

SEQ ID NO: 6046 - DNA, 25 bp, Homo sapiens
cagcccccaaacaaggaattatcca

SEQ ID NO: 6047 - DNA, 25 bp, Homo sapiens
ctgagcatcccgcagtgtacaggac

SEQ ID NO: 6048 - DNA, 25 bp, Homo sapiens
gaattccgtatcagtcaccatttta

SEQ ID NO: 6049 - DNA, 25 bp, Homo sapiens
gatcagatttttccagaattccgta

SEQ ID NO: 6050 - DNA, 25 bp, Homo sapiens
gggtcgggtaggaaggtatgctgca

SEQ ID NO: 6051 - DNA, 25 bp, Homo sapiens
ggtatgctgcagacatttggtgggt

SEQ ID NO: 6052 - DNA, 25 bp, Homo sapiens
gtcatttggcaacatctacagacaa

SEQ ID NO: 6053 - DNA, 25 bp, Homo sapiens
gtggttcctaacgagagcaattttt

SEQ ID NO: 6054 - DNA, 25 bp, Homo sapiens
tactctcactttaaactcaccaaag

SEQ ID NO: 6055 - DNA, 25 bp, Homo sapiens
aacttgctatttatggtgactctgt

SEQ ID NO: 6056 - DNA, 25 bp, Homo sapiens
atggaagtctattgttttattcttt

SEQ ID NO: 6057 - DNA, 25 bp, Homo sapiens
atggctttgtttgtaattcgggtat

SEQ ID NO: 6058 - DNA, 25 bp, Homo sapiens
atgttgttcttaattgccaaaattg

SEQ ID NO: 6059 - DNA, 25 bp, Homo sapiens
gatctttcaaaccaaacgtatacca

SEQ ID NO: 6060 - DNA, 25 bp, Homo sapiens
gctaatttctgctgttcttgatttg

SEQ ID NO: 6061 - DNA, 25 bp, Homo sapiens
gctgttcttgatttggttctttatt

SEQ ID NO: 6062 - DNA, 25 bp, Homo sapiens
ggtgactctgtggttaggcttattt

SEQ ID NO: 6063 - DNA, 25 bp, Homo sapiens
gtaaactgtggatcacatgattctt

SEQ ID NO: 6064 - DNA, 25 bp, Homo sapiens
ttaacacacactgactttttgaaga

SEQ ID NO: 6065 - DNA, 25 bp, Homo sapiens
ttaatcatccttttggatctttcaa

SEQ ID NO: 6066 - DNA, 25 bp, Homo sapiens
acaatggcctggttcaatttctttc

SEQ ID NO: 6067 - DNA, 25 bp, Homo sapiens
attcctcacatctttaacttagtat

SEQ ID NO: 6068 - DNA, 25 bp, Homo sapiens
gaaacactgtacaccatagtttaca

SEQ ID NO: 6069 - DNA, 25 bp, Homo sapiens
gaaagttgtgtgggtctctaattaa

SEQ ID NO: 6070 - DNA, 25 bp, Homo sapiens
ggaaagcaggattccatcgctggaa

SEQ ID NO: 6071 - DNA, 25 bp, Homo sapiens
ggataatattgattcctcacatctt

SEQ ID NO: 6072 - DNA, 25 bp, Homo sapiens
gtcacgtgtattttcattaccactc

SEQ ID NO: 6073 - DNA, 25 bp, Homo sapiens
tagatttaccctttatagaacatat

SEQ ID NO: 6074 - DNA, 25 bp, Homo sapiens
tcagtgctctgcttttagtcacgtg

SEQ ID NO: 6075 - DNA, 25 bp, Homo sapiens
ttacctagcatttcaaaacccaaat

SEQ ID NO: 6076 - DNA, 25 bp, Homo sapiens
ttccccccaaaattatcagtgctct

SEQ ID NO: 6077 - DNA, 25 bp, Homo sapiens
atgggcctcatgtcaactacagcca

SEQ ID NO: 6078 - DNA, 25 bp, Homo sapiens
ctcactgccagtcattgggctcgac

SEQ ID NO: 6079 - DNA, 25 bp, Homo sapiens
cttccgctacatggcaatcgggggc

SEQ ID NO: 6080 - DNA, 25 bp, Homo sapiens
gaaatcctcaagttcgttgctcgga

SEQ ID NO: 6081 - DNA, 25 bp, Homo sapiens
gaggacaacacccactttgagggca

SEQ ID NO: 6082 - DNA, 25 bp, Homo sapiens
gctgactcacttcatgcagtgcacc

SEQ ID NO: 6083 - DNA, 25 bp, Homo sapiens
ggttcctgtacgctgaggatgggcc

SEQ ID NO: 6084 - DNA, 25 bp, Homo sapiens
gtgcaatgcactgaacagcctgtcc

SEQ ID NO: 6085 - DNA, 25 bp, Homo sapiens
tgccaccctgggtgaacatctggct

SEQ ID NO: 6086 - DNA, 25 bp, Homo sapiens
tgccgatgatcttcaagctccgggc

SEQ ID NO: 6087 - DNA, 25 bp, Homo sapiens
tgtccgtgctggtgaccatcgagat

SEQ ID NO: 6088 - DNA, 25 bp, Homo sapiens
cgcctgctatgccatcgggaaggac

SEQ ID NO: 6089 - DNA, 25 bp, Homo sapiens
cgtgatcgacgagttctattcccgc

SEQ ID NO: 6090 - DNA, 25 bp, Homo sapiens
gaaccgctcgatgttcgagtcgctg

SEQ ID NO: 6091 - DNA, 25 bp, Homo sapiens
gaagaacttcatcaatcagggcccc

SEQ ID NO: 6092 - DNA, 25 bp, Homo sapiens
gagtcgctggaccttagctggaagc

SEQ ID NO: 6093 - DNA, 25 bp, Homo sapiens
gctcccggtgctgcggaagaactga

SEQ ID NO: 6094 - DNA, 25 bp, Homo sapiens
ggagatgctgaagcgcattccgcag

SEQ ID NO: 6095 - DNA, 25 bp, Homo sapiens
tagttggggaggaggcgctcacctc

SEQ ID NO: 6096 - DNA, 25 bp, Homo sapiens
tcaatcagggcccctacgagaaccg

SEQ ID NO: 6097 - DNA, 25 bp, Homo sapiens
tcgggaaggacgtgcaggccatgaa

SEQ ID NO: 6098 - DNA, 25 bp, Homo sapiens
tgcctactctgacgggagcatctgt

SEQ ID NO: 6099 - DNA, 25 bp, Homo sapiens
aatcgcctctcttgctacagaaaga

SEQ ID NO: 6100 - DNA, 25 bp, Homo sapiens
agcatcctctgccaagaccaaaagg

SEQ ID NO: 6101 - DNA, 25 bp, Homo sapiens
attgggctaactttgctgctaggag

SEQ ID NO: 6102 - DNA, 25 bp, Homo sapiens
gctaggagttcaagccatgcctgca

SEQ ID NO: 6103 - DNA, 25 bp, Homo sapiens
ggagtagctgacctgacacagattg

SEQ ID NO: 6104 - DNA, 25 bp, Homo sapiens
gtacttgttttcaccattgggctaa

SEQ ID NO: 6105 - DNA, 25 bp, Homo sapiens
tctctttcgtgattccttgcaacaa

SEQ ID NO: 6106 - DNA, 25 bp, Homo sapiens
tctggagaacaccattcctgatttc

SEQ ID NO: 6107 - DNA, 25 bp, Homo sapiens
tgtgagatgatctgttactgcaact

SEQ ID NO: 6108 - DNA, 25 bp, Homo sapiens
ttcagcgaattgctctgctgcccaa

SEQ ID NO: 6109 - DNA, 25 bp, Homo sapiens
tttgcccaaactcacccagtgagtg

SEQ ID NO: 6110 - DNA, 25 bp, Homo sapiens
atatggactttcttgcaagcaacaa

SEQ ID NO: 6111 - DNA, 25 bp, Homo sapiens
atcatggagggtttagtgcttatct

SEQ ID NO: 6112 - DNA, 25 bp, Homo sapiens
gaaatatattgtgcgtctcctcagt

SEQ ID NO: 6113 - DNA, 25 bp, Homo sapiens
ggctgtgacatcaatgctatcatct

SEQ ID NO: 6114 - DNA, 25 bp, Homo sapiens
ggtttcacttgcacatcatggaggg

SEQ ID NO: 6115 - DNA, 25 bp, Homo sapiens
gtgcctcactggacttgtccaatta

SEQ ID NO: 6116 - DNA, 25 bp, Homo sapiens
gtgcttatctaatttgtgcctcact

SEQ ID NO: 6117 - DNA, 25 bp, Homo sapiens
tgctggggttggaggtttcacttgc

SEQ ID NO: 6118 - DNA, 25 bp, Homo sapiens
ttatagctgtaggttttctgtgttt

SEQ ID NO: 6119 - DNA, 25 bp, Homo sapiens
ttcacacggcagctggccaatgaag

SEQ ID NO: 6120 - DNA, 25 bp, Homo sapiens
ttgtctgtgtgcgcaaatccaaaac

SEQ ID NO: 6121 - DNA, 25 bp, Homo sapiens
aaaggagtgtctgcagacctgccga

SEQ ID NO: 6122 - DNA, 25 bp, Homo sapiens
aatcccgagagtccggagggctgtg

SEQ ID NO: 6123 - DNA, 25 bp, Homo sapiens
caacggtaacaacttcgtcacagaa

SEQ ID NO: 6124 - DNA, 25 bp, Homo sapiens
ctctgggcatttgatgctgtcaagg

SEQ ID NO: 6125 - DNA, 25 bp, Homo sapiens
gatcagggggtgggcaactggtaac

SEQ ID NO: 6126 - DNA, 25 bp, Homo sapiens
gcagagagtactgcggtgtccctgg

SEQ ID NO: 6127 - DNA, 25 bp, Homo sapiens
ggctgtgctaccccaagaagaggaa

SEQ ID NO: 6128 - DNA, 25 bp, Homo sapiens
gggaatgaccagcaggtatttctat

SEQ ID NO: 6129 - DNA, 25 bp, Homo sapiens
tcctgtggcaggcagcgccaagcaa

SEQ ID NO: 6130 - DNA, 25 bp, Homo sapiens
tgacaactggccggtctgcaagtca

SEQ ID NO: 6131 - DNA, 25 bp, Homo sapiens
tgcagacctgccgaactgtggcggc

SEQ ID NO: 6132 - DNA, 25 bp, Homo sapiens
aagtgcttcatctgtggaatcggca

SEQ ID NO: 6133 - DNA, 25 bp, Homo sapiens
atacgagctctacagggtggtcttc

SEQ ID NO: 6134 - DNA, 25 bp, Homo sapiens
atccagggtctgatcatcgacgctt

SEQ ID NO: 6135 - DNA, 25 bp, Homo sapiens
atcctgttggccatcatccagggtc

SEQ ID NO: 6136 - DNA, 25 bp, Homo sapiens
cttcgagactcacacgctggaggag

SEQ ID NO: 6137 - DNA, 25 bp, Homo sapiens
gaacacacgggtcaggagtcttatg

SEQ ID NO: 6138 - DNA, 25 bp, Homo sapiens
gatgacgtgttacctgtttcacatg

SEQ ID NO: 6139 - DNA, 25 bp, Homo sapiens
gtttcacatgtacgtgggtgtccgg

SEQ ID NO: 6140 - DNA, 25 bp, Homo sapiens
tcatcgacgcttttggtgagctccg

SEQ ID NO: 6141 - DNA, 25 bp, Homo sapiens
tcccagctggtgattgtttccgtaa

SEQ ID NO: 6142 - DNA, 25 bp, Homo sapiens
ttgatacgacaccgcatggcttcga

SEQ ID NO: 6143 - DNA, 25 bp, Homo sapiens
aatggcaaccctggccagatagctg

SEQ ID NO: 6144 - DNA, 25 bp, Homo sapiens
accctggccagatagctggaagcac

SEQ ID NO: 6145 - DNA, 25 bp, Homo sapiens
agcacagggttgctcttcaacctgc

SEQ ID NO: 6146 - DNA, 25 bp, Homo sapiens
aggaatctgccgccagggagaatgg

SEQ ID NO: 6147 - DNA, 25 bp, Homo sapiens
ctcccggctcagttcactataagaa

SEQ ID NO: 6148 - DNA, 25 bp, Homo sapiens
ctcctccagcaagacagatgcctag

SEQ ID NO: 6149 - DNA, 25 bp, Homo sapiens
gaatctgccgccagggagaatggca

SEQ ID NO: 6150 - DNA, 25 bp, Homo sapiens
gctggaagcacagggttgctcttca

SEQ ID NO: 6151 - DNA, 25 bp, Homo sapiens
ggcaaccctggccagatagctggaa

SEQ ID NO: 6152 - DNA, 25 bp, Homo sapiens
tcctccagcaagacagatgcctagc

SEQ ID NO: 6153 - DNA, 25 bp, Homo sapiens
tgccgccagggagaatggcaaccct

SEQ ID NO: 6154 - DNA, 25 bp, Homo sapiens
accctgctcccagggacttgggtgg

SEQ ID NO: 6155 - DNA, 25 bp, Homo sapiens
actgtgctcaggctggtgccagcct

SEQ ID NO: 6156 - DNA, 25 bp, Homo sapiens
agaacatcctcaagacagtttcctt

SEQ ID NO: 6157 - DNA, 25 bp, Homo sapiens
agcagacctaaggcatctctactcc

SEQ ID NO: 6158 - DNA, 25 bp, Homo sapiens
cacaaaaagtgatgctcgccctggg

SEQ ID NO: 6159 - DNA, 25 bp, Homo sapiens
cactgctagcagggcttcaaccagg

SEQ ID NO: 6160 - DNA, 25 bp, Homo sapiens
ccaggtcatcacttggctcagtgga

SEQ ID NO: 6161 - DNA, 25 bp, Homo sapiens
cgcccagattcctgcagtggagagg

SEQ ID NO: 6162 - DNA, 25 bp, Homo sapiens
gaagtgctcccaagcagacacaaca

SEQ ID NO: 6163 - DNA, 25 bp, Homo sapiens
ggagaggcttccctgaggacataat

SEQ ID NO: 6164 - DNA, 25 bp, Homo sapiens
tctggagatacccagaggtccccca

SEQ ID NO: 6165 - DNA, 25 bp, Homo sapiens
agtggcacttgcttttattagagaa

SEQ ID NO: 6166 - DNA, 25 bp, Homo sapiens
cagtttgcacttatggactcctgtt

SEQ ID NO: 6167 - DNA, 25 bp, Homo sapiens
ctcctcaaacctaccactcaggaat

SEQ ID NO: 6168 - DNA, 25 bp, Homo sapiens
gaatgtttgctggggccgaaagaac

SEQ ID NO: 6169 - DNA, 25 bp, Homo sapiens
gacctggattgaatactggcctaga

SEQ ID NO: 6170 - DNA, 25 bp, Homo sapiens
ggcctagagacacaacatgttcatc

SEQ ID NO: 6171 - DNA, 25 bp, Homo sapiens
gggcatgaagacagatactcctcca

SEQ ID NO: 6172 - DNA, 25 bp, Homo sapiens
gttcatcgtgtcaagcatttttagc

SEQ ID NO: 6173 - DNA, 25 bp, Homo sapiens
gtttcaggtacatctaccctttaga

SEQ ID NO: 6174 - DNA, 25 bp, Homo sapiens
taaattggaacacctcctcaaacct

SEQ ID NO: 6175 - DNA, 25 bp, Homo sapiens
taccctttagattccttgacctgga

SEQ ID NO: 6176 - DNA, 25 bp, Homo sapiens
aataagcttcttggttctacttctc

SEQ ID NO: 6177 - DNA, 25 bp, Homo sapiens
ccccaatttcactttctcagaggaa

SEQ ID NO: 6178 - DNA, 25 bp, Homo sapiens
cgcacaaaggggtccaacagctctt

SEQ ID NO: 6179 - DNA, 25 bp, Homo sapiens
ctcttctttgattccctgggatagt

SEQ ID NO: 6180 - DNA, 25 bp, Homo sapiens
gaaatcccaagcttaggagccctgg

SEQ ID NO: 6181 - DNA, 25 bp, Homo sapiens
gcccctctctacatctggggatgca

SEQ ID NO: 6182 - DNA, 25 bp, Homo sapiens
gctcccactcaatacaaaaaggccc

SEQ ID NO: 6183 - DNA, 25 bp, Homo sapiens
ggcatttggtagagcttgggggtgt

SEQ ID NO: 6184 - DNA, 25 bp, Homo sapiens
gggtccaacagctctttgagtaggc

SEQ ID NO: 6185 - DNA, 25 bp, Homo sapiens
tattgtgcctgaaatttcccgagag

SEQ ID NO: 6186 - DNA, 25 bp, Homo sapiens
tgggggtggaccgaatttggcaaga

SEQ ID NO: 6187 - DNA, 25 bp, Homo sapiens
aacacctgtccattgaagatttcac

SEQ ID NO: 6188 - DNA, 25 bp, Homo sapiens
agatcactgctgaggtcacaagccc

SEQ ID NO: 6189 - DNA, 25 bp, Homo sapiens
ctctgctctgcctcgatggaagcaa

SEQ ID NO: 6190 - DNA, 25 bp, Homo sapiens
gaacaagcctgtagaggagctcccc

SEQ ID NO: 6191 - DNA, 25 bp, Homo sapiens
gaggacctgaaggcggagtctggca

SEQ ID NO: 6192 - DNA, 25 bp, Homo sapiens
gcaaccttagggactggagccagat

SEQ ID NO: 6193 - DNA, 25 bp, Homo sapiens
gccccaaagtggacgtgttcaatgc

SEQ ID NO: 6194 - DNA, 25 bp, Homo sapiens
ggttgtaaagcagtaccctaccctg

SEQ ID NO: 6195 - DNA, 25 bp, Homo sapiens
taacagcaacctcagttctgggcct

SEQ ID NO: 6196 - DNA, 25 bp, Homo sapiens
tcactcaggcctttgggatgactcc

SEQ ID NO: 6197 - DNA, 25 bp, Homo sapiens
ttctcaccgatattagtcctacacc

SEQ ID NO: 6198 - DNA, 25 bp, Homo sapiens
aactctcttccatcaaggcatatct

SEQ ID NO: 6199 - DNA, 25 bp, Homo sapiens
aatgctgagttgaatgccctggcta

SEQ ID NO: 6200 - DNA, 25 bp, Homo sapiens
acacatatggcccgggagctacaac

SEQ ID NO: 6201 - DNA, 25 bp, Homo sapiens
acaggcagatatggctttctccttc

SEQ ID NO: 6202 - DNA, 25 bp, Homo sapiens
atctacccttactcatatgcttaca

SEQ ID NO: 6203 - DNA, 25 bp, Homo sapiens
caagtatgttgccagctacgtcctg

SEQ ID NO: 6204 - DNA, 25 bp, Homo sapiens
ctacaacaatctatcctgctgctgg

SEQ ID NO: 6205 - DNA, 25 bp, Homo sapiens
gatattccttcacctttgaacttcg

SEQ ID NO: 6206 - DNA, 25 bp, Homo sapiens
gcatatctgacaatccactcgtact

SEQ ID NO: 6207 - DNA, 25 bp, Homo sapiens
tgatttcatccgcaacaaactctct

SEQ ID NO: 6208 - DNA, 25 bp, Homo sapiens
tggatctagcattggcacagacccc

SEQ ID NO: 6209 - DNA, 25 bp, Homo sapiens
aacaaagactcttcttgcgtctctg

SEQ ID NO: 6210 - DNA, 25 bp, Homo sapiens
atatatctccgtcaattactctgtg

SEQ ID NO: 6211 - DNA, 25 bp, Homo sapiens
catgtttattgtccttatgccttct

SEQ ID NO: 6212 - DNA, 25 bp, Homo sapiens
gaacctactgggaacttctgagtgg

SEQ ID NO: 6213 - DNA, 25 bp, Homo sapiens
gcgtctctgcttcaggtaacttcaa

SEQ ID NO: 6214 - DNA, 25 bp, Homo sapiens
ggagctggtagttacgttgtccgca

SEQ ID NO: 6215 - DNA, 25 bp, Homo sapiens
gggccctatatcacctgtattcagg

SEQ ID NO: 6216 - DNA, 25 bp, Homo sapiens
gtaacttcaacatctccgctgatga

SEQ ID NO: 6217 - DNA, 25 bp, Homo sapiens
gtgctaaatggttctgtcttcctca

SEQ ID NO: 6218 - DNA, 25 bp, Homo sapiens
taataagcccaaactttcctcagct

SEQ ID NO: 6219 - DNA, 25 bp, Homo sapiens
tataactgtgacacctcctgactca

SEQ ID NO: 6220 - DNA, 25 bp, Homo sapiens
aagaagacgactgctaagacacggc

SEQ ID NO: 6221 - DNA, 25 bp, Homo sapiens
atacctttgaaccaagattctgttt

SEQ ID NO: 6222 - DNA, 25 bp, Homo sapiens
caaacacaacacaacagaattcctg

SEQ ID NO: 6223 - DNA, 25 bp, Homo sapiens
cctcctagcccttggtcagatggca

SEQ ID NO: 6224 - DNA, 25 bp, Homo sapiens
cctctttctcagcagagctgtagct

SEQ ID NO: 6225 - DNA, 25 bp, Homo sapiens
ctgactgtggcattactacgcctcc

SEQ ID NO: 6226 - DNA, 25 bp, Homo sapiens
gagctgtagctgactgtggcattac

SEQ ID NO: 6227 - DNA, 25 bp, Homo sapiens
gccagagattctgcaacacgaattc

SEQ ID NO: 6228 - DNA, 25 bp, Homo sapiens
gcccttggtcagatggcagccagag

SEQ ID NO: 6229 - DNA, 25 bp, Homo sapiens
taagacacggcaggggggcctggag

SEQ ID NO: 6230 - DNA, 25 bp, Homo sapiens
tagcagagaatacctttgaaccaag

SEQ ID NO: 6231 - DNA, 25 bp, Homo sapiens
aactcagtttcacaagggaacaatc

SEQ ID NO: 6232 - DNA, 25 bp, Homo sapiens
aactgtttaagctgtatcatcccaa

SEQ ID NO: 6233 - DNA, 25 bp, Homo sapiens
aagtatcctttcatgaacggggcat

SEQ ID NO: 6234 - DNA, 25 bp, Homo sapiens
aggagacttagagccaaactgttta

SEQ ID NO: 6235 - DNA, 25 bp, Homo sapiens
caggttccacaagcacaaactttac

SEQ ID NO: 6236 - DNA, 25 bp, Homo sapiens
gaacggggcatgcaatagcttaaga

SEQ ID NO: 6237 - DNA, 25 bp, Homo sapiens
gagtcattttcataagatcaattca

SEQ ID NO: 6238 - DNA, 25 bp, Homo sapiens
gctactcagagcaacaggttccaca

SEQ ID NO: 6239 - DNA, 25 bp, Homo sapiens
ggaacaatctatacctttctaaaag

SEQ ID NO: 6240 - DNA, 25 bp, Homo sapiens
gtatcatcccaacaaagtatccttt

SEQ ID NO: 6241 - DNA, 25 bp, Homo sapiens
tacaggcttctttacataaactgag

SEQ ID NO: 6242 - DNA, 25 bp, Homo sapiens
aatgccggctggctcagtgatggct

SEQ ID NO: 6243 - DNA, 25 bp, Homo sapiens
agctgtatggtgtctactgcttcag

SEQ ID NO: 6244 - DNA, 25 bp, Homo sapiens
atgaccgctgtgatgcgggctggtt

SEQ ID NO: 6245 - DNA, 25 bp, Homo sapiens
atggctctgtgcaatatcccatcac

SEQ ID NO: 6246 - DNA, 25 bp, Homo sapiens
caatggccgtttttactatctgatc

SEQ ID NO: 6247 - DNA, 25 bp, Homo sapiens
cagtcctactgaggctgcagtgcgc

SEQ ID NO: 6248 - DNA, 25 bp, Homo sapiens
ccagaacacagtgcccggagtcagg

SEQ ID NO: 6249 - DNA, 25 bp, Homo sapiens
ccccaccaaactgacctatgatgaa

SEQ ID NO: 6250 - DNA, 25 bp, Homo sapiens
ccccatctctaggccaagaaggcgc

SEQ ID NO: 6251 - DNA, 25 bp, Homo sapiens
ctggttggcggatggcagcgtccgc

SEQ ID NO: 6252 - DNA, 25 bp, Homo sapiens
gcggtgcaagcttgtctcaatgatg

SEQ ID NO: 6253 - DNA, 25 bp, Homo sapiens
aattcatattcttcatatccttctt

SEQ ID NO: 6254 - DNA, 25 bp, Homo sapiens
acttcttgtctatagttgtcagtat

SEQ ID NO: 6255 - DNA, 25 bp, Homo sapiens
atatccttcttacacgactaagttg

SEQ ID NO: 6256 - DNA, 25 bp, Homo sapiens
catgtttggaagacccttggaagag

SEQ ID NO: 6257 - DNA, 25 bp, Homo sapiens
gaaattctttcagctatcagtaggc

SEQ ID NO: 6258 - DNA, 25 bp, Homo sapiens
gcccttgacatctggaaacctctac

SEQ ID NO: 6259 - DNA, 25 bp, Homo sapiens
ggaaacctctacatatttatataac

SEQ ID NO: 6260 - DNA, 25 bp, Homo sapiens
ggagttcagtggagaggttagagcc

SEQ ID NO: 6261 - DNA, 25 bp, Homo sapiens
ggttagagccagccacacttgaacc

SEQ ID NO: 6262 - DNA, 25 bp, Homo sapiens
taaatctcactctaggagttcagtg

SEQ ID NO: 6263 - DNA, 25 bp, Homo sapiens
tgatgaaaacctacatattccatgt

SEQ ID NO: 6264 - DNA, 25 bp, Homo sapiens
aattcaggctttggatgtttcttta

SEQ ID NO: 6265 - DNA, 25 bp, Homo sapiens
agagctgtcctggtatctagaccca

SEQ ID NO: 6266 - DNA, 25 bp, Homo sapiens
agcccagtttcactgccatatactc

SEQ ID NO: 6267 - DNA, 25 bp, Homo sapiens
aggactttctgaagcctcacttatg

SEQ ID NO: 6268 - DNA, 25 bp, Homo sapiens
atgcctgaagccaggccatggctat

SEQ ID NO: 6269 - DNA, 25 bp, Homo sapiens
atgttactatctgcttttggttata

SEQ ID NO: 6270 - DNA, 25 bp, Homo sapiens
gaagcctcacttatgagatgcctga

SEQ ID NO: 6271 - DNA, 25 bp, Homo sapiens
gagtttctctcacattactgtatat

SEQ ID NO: 6272 - DNA, 25 bp, Homo sapiens
gatgtttctttagcagttttgtgat

SEQ ID NO: 6273 - DNA, 25 bp, Homo sapiens
tatctagacccatcttctttttgaa

SEQ ID NO: 6274 - DNA, 25 bp, Homo sapiens
ttttctggggttatgatggccttac

SEQ ID NO: 6275 - DNA, 25 bp, Homo sapiens
aaacctgtgatatttatacccttgt

SEQ ID NO: 6276 - DNA, 25 bp, Homo sapiens
aatccacacacgcatagcaaacctc

SEQ ID NO: 6277 - DNA, 25 bp, Homo sapiens
agagacagaacgtgcagcggtggcc

SEQ ID NO: 6278 - DNA, 25 bp, Homo sapiens
agcaaacctccaatgcatgtacaga

SEQ ID NO: 6279 - DNA, 25 bp, Homo sapiens
agcggcgggactgagctgttgagtt

SEQ ID NO: 6280 - DNA, 25 bp, Homo sapiens
agcttaatctctatgtttctctcca

SEQ ID NO: 6281 - DNA, 25 bp, Homo sapiens
gaaagcaccaaattcaaccatcatc

SEQ ID NO: 6282 - DNA, 25 bp, Homo sapiens
gagagaagtcatccacacacaatcc

SEQ ID NO: 6283 - DNA, 25 bp, Homo sapiens
gccattcagtctcagttcagaaaat

SEQ ID NO: 6284 - DNA, 25 bp, Homo sapiens
gtgagcgacaaggtgctgggccaac

SEQ ID NO: 6285 - DNA, 25 bp, Homo sapiens
tcagtcctagtgggagaaccccctc

SEQ ID NO: 6286 - DNA, 25 bp, Homo sapiens
aagagaagactccacctaatcctaa

SEQ ID NO: 6287 - DNA, 25 bp, Homo sapiens
caagttcttcagttcacgatcttct

SEQ ID NO: 6288 - DNA, 25 bp, Homo sapiens
ctcccgatgtggttgcattcgtggc

SEQ ID NO: 6289 - DNA, 25 bp, Homo sapiens
gaagctacacacatggctgatgtca

SEQ ID NO: 6290 - DNA, 25 bp, Homo sapiens
gactcggagtgagcgtggagatggc

SEQ ID NO: 6291 - DNA, 25 bp, Homo sapiens
gagagagaaggaacacctccgatcg

SEQ ID NO: 6292 - DNA, 25 bp, Homo sapiens
gagatggtcaggaggctcccgatgt

SEQ ID NO: 6293 - DNA, 25 bp, Homo sapiens
gctcccggtgaatctcagcaagagg

SEQ ID NO: 6294 - DNA, 25 bp, Homo sapiens
ggaacacctccgatcgaagaacgta

SEQ ID NO: 6295 - DNA, 25 bp, Homo sapiens
gttcacgatcttctagttgcagcga

SEQ ID NO: 6296 - DNA, 25 bp, Homo sapiens
gttgcagcgatgagtgcacgagtga

SEQ ID NO: 6297 - DNA, 25 bp, Homo sapiens
aactgtagtgtgtctgctgttacct

SEQ ID NO: 6298 - DNA, 25 bp, Homo sapiens
aagcctgacctttcaaatccatgat

SEQ ID NO: 6299 - DNA, 25 bp, Homo sapiens
aattctgcacaatagcccatgctgt

SEQ ID NO: 6300 - DNA, 25 bp, Homo sapiens
gctaccaatctgaattcgaggccca

SEQ ID NO: 6301 - DNA, 25 bp, Homo sapiens
ggggtgccctgggctaatgttaggg

SEQ ID NO: 6302 - DNA, 25 bp, Homo sapiens
ggtacacaactagcaccattcttga

SEQ ID NO: 6303 - DNA, 25 bp, Homo sapiens
gttctggcatcatttacgtagttta

SEQ ID NO: 6304 - DNA, 25 bp, Homo sapiens
tcacagcaaacctgagcagcgcgtc

SEQ ID NO: 6305 - DNA, 25 bp, Homo sapiens
tgctgttacctagagggtctcacct

SEQ ID NO: 6306 - DNA, 25 bp, Homo sapiens
tggtgtgactaattccttacctctc

SEQ ID NO: 6307 - DNA, 25 bp, Homo sapiens
ttacctctcccaaggagggtacaca

SEQ ID NO: 6308 - DNA, 25 bp, Homo sapiens
atatgctcatgcaccatgaccggtt

SEQ ID NO: 6309 - DNA, 25 bp, Homo sapiens
atcgcattcctgagcttcggcaggt

SEQ ID NO: 6310 - DNA, 25 bp, Homo sapiens
atgaccggtttaaagtcttcgcaga

SEQ ID NO: 6311 - DNA, 25 bp, Homo sapiens
cagcccgacctgttcaaggacattg

SEQ ID NO: 6312 - DNA, 25 bp, Homo sapiens
cattgcccagtatgcccgggagatc

SEQ ID NO: 6313 - DNA, 25 bp, Homo sapiens
cggatgaggccatctgagcctccag

SEQ ID NO: 6314 - DNA, 25 bp, Homo sapiens
ctctgaccattggcaccatggacgg

SEQ ID NO: 6315 - DNA, 25 bp, Homo sapiens
cttcatctttggcatgcgggtggag

SEQ ID NO: 6316 - DNA, 25 bp, Homo sapiens
gaacatagccacctctggcaagttc

SEQ ID NO: 6317 - DNA, 25 bp, Homo sapiens
gcccaggagtactacgatcgcattc

SEQ ID NO: 6318 - DNA, 25 bp, Homo sapiens
gtcagcgccttgtacaagaacccaa

SEQ ID NO: 6319 - DNA, 25 bp, Homo sapiens
ccaccatgagtcctgtgtccaggcc

SEQ ID NO: 6320 - DNA, 25 bp, Homo sapiens
cccctggcaggggagtccagctgag

SEQ ID NO: 6321 - DNA, 25 bp, Homo sapiens
ccttcttcctgaacgtggtccaggc

SEQ ID NO: 6322 - DNA, 25 bp, Homo sapiens
cgccgtctcggacctgaggaagagt

SEQ ID NO: 6323 - DNA, 25 bp, Homo sapiens
gcccaggccatcatgagcaagctgt

SEQ ID NO: 6324 - DNA, 25 bp, Homo sapiens
gctgtgtggagtacgagcccaactt

SEQ ID NO: 6325 - DNA, 25 bp, Homo sapiens
ggaccaactactctggcaggatctg

SEQ ID NO: 6326 - DNA, 25 bp, Homo sapiens
ggaggccgcaggctactaagacact

SEQ ID NO: 6327 - DNA, 25 bp, Homo sapiens
gtggaagaggtggcggggaccagct

SEQ ID NO: 6328 - DNA, 25 bp, Homo sapiens
tgacctgagagcggccattgcagcc

SEQ ID NO: 6329 - DNA, 25 bp, Homo sapiens
tgcccagagctgaagtctggcccca

SEQ ID NO: 6330 - DNA, 25 bp, Homo sapiens
agaaagggtgatctgtcccatttcc

SEQ ID NO: 6331 - DNA, 25 bp, Homo sapiens
agtaacggagacttactcggcttct

SEQ ID NO: 6332 - DNA, 25 bp, Homo sapiens
agtcaaggagcttctgctttgtccg

SEQ ID NO: 6333 - DNA, 25 bp, Homo sapiens
ccatcccatagaagtccagcagaca

SEQ ID NO: 6334 - DNA, 25 bp, Homo sapiens
ccatttccagtgttcctggcaacct

SEQ ID NO: 6335 - DNA, 25 bp, Homo sapiens
ccttgctcccgtctaatatgaccag

SEQ ID NO: 6336 - DNA, 25 bp, Homo sapiens
ctgaccctctgcagcatggtaacta

SEQ ID NO: 6337 - DNA, 25 bp, Homo sapiens
gagggtcacatactatgctctgtac

SEQ ID NO: 6338 - DNA, 25 bp, Homo sapiens
gcccaacgcagctacgagggtcaca

SEQ ID NO: 6339 - DNA, 25 bp, Homo sapiens
gttgtcactcctaattctcaagtac

SEQ ID NO: 6340 - DNA, 25 bp, Homo sapiens
tgagctggaataccacactgaccaa

SEQ ID NO: 6341 - DNA, 25 bp, Homo sapiens
acatgtccaagagccttctaaagat

SEQ ID NO: 6342 - DNA, 25 bp, Homo sapiens
cccacctcaactattactggctgcc

SEQ ID NO: 6343 - DNA, 25 bp, Homo sapiens
ctcatgcgaaacattgtcagggtgg

SEQ ID NO: 6344 - DNA, 25 bp, Homo sapiens
cttcttcagcgttttcggcatgtgt

SEQ ID NO: 6345 - DNA, 25 bp, Homo sapiens
gaaacattgtcagggtggtcgtcct

SEQ ID NO: 6346 - DNA, 25 bp, Homo sapiens
ggtcgtcctggacaaagtcacagac

SEQ ID NO: 6347 - DNA, 25 bp, Homo sapiens
gtcagggtggtcgtcctggacaaag

SEQ ID NO: 6348 - DNA, 25 bp, Homo sapiens
tattactggctgcccatcatgacct

SEQ ID NO: 6349 - DNA, 25 bp, Homo sapiens
tcagcgttttcggcatgtgtgtgga

SEQ ID NO: 6350 - DNA, 25 bp, Homo sapiens
tggacaaagtcacagacctgctgct

SEQ ID NO: 6351 - DNA, 25 bp, Homo sapiens
tgtccaagagccttctaaagattct

SEQ ID NO: 6352 - DNA, 25 bp, Homo sapiens
aagcatgccttaaacccagtgaagc

SEQ ID NO: 6353 - DNA, 25 bp, Homo sapiens
actatgattcagaacctgtgccccc

SEQ ID NO: 6354 - DNA, 25 bp, Homo sapiens
agaatgacctcagtggcaacagcca

SEQ ID NO: 6355 - DNA, 25 bp, Homo sapiens
agaggagctattctcatcacctcta

SEQ ID NO: 6356 - DNA, 25 bp, Homo sapiens
cagatttgctgcttgtgccataaaa

SEQ ID NO: 6357 - DNA, 25 bp, Homo sapiens
cagccaagggctataccagtgactt

SEQ ID NO: 6358 - DNA, 25 bp, Homo sapiens
ccccgaagccaatacttgtcagcag

SEQ ID NO: 6359 - DNA, 25 bp, Homo sapiens
cctgtacagactcctcctgaggagg

SEQ ID NO: 6360 - DNA, 25 bp, Homo sapiens
ctcctgaggaggggccctcctcctc

SEQ ID NO: 6361 - DNA, 25 bp, Homo sapiens
ctctgactgcctccaacgtaaaaat

SEQ ID NO: 6362 - DNA, 25 bp, Homo sapiens
ggagaactatgaaagctgcccacct

SEQ ID NO: 6363 - DNA, 25 bp, Homo sapiens
aagtttgagtgtaccaggaacagaa

SEQ ID NO: 6364 - DNA, 25 bp, Homo sapiens
caaggctgctgtgacagccctggcc

SEQ ID NO: 6365 - DNA, 25 bp, Homo sapiens
ctggctttgggttgtccggagccag

SEQ ID NO: 6366 - DNA, 25 bp, Homo sapiens
gaaccagtccctgaccaggatgagc

SEQ ID NO: 6367 - DNA, 25 bp, Homo sapiens
gaaggaccatgggaacatcaaggcc

SEQ ID NO: 6368 - DNA, 25 bp, Homo sapiens
gcaatttatcaagccagtggaagca

SEQ ID NO: 6369 - DNA, 25 bp, Homo sapiens
gccaaggagacgtggctggcgcttc

SEQ ID NO: 6370 - DNA, 25 bp, Homo sapiens
ggagacttaccacggcaagtttgcc

SEQ ID NO: 6371 - DNA, 25 bp, Homo sapiens
ggatgagctggatcagctttccaag

SEQ ID NO: 6372 - DNA, 25 bp, Homo sapiens
ggcaagtttgccaattccgaagtgg

SEQ ID NO: 6373 - DNA, 25 bp, Homo sapiens
gtcaagtccattgtagactttgtga

SEQ ID NO: 6374 - DNA, 25 bp, Homo sapiens
atgttctccagcaacgacaaggtga

SEQ ID NO: 6375 - DNA, 25 bp, Homo sapiens
cagtggtggggtggcggccaacgat

SEQ ID NO: 6376 - DNA, 25 bp, Homo sapiens
gaagagcttcgagactttctctcac

SEQ ID NO: 6377 - DNA, 25 bp, Homo sapiens
gaaggcctgaaggtcagataccccc

SEQ ID NO: 6378 - DNA, 25 bp, Homo sapiens
gagacatccagtggtggggtggcgg

SEQ ID NO: 6379 - DNA, 25 bp, Homo sapiens
gccaagatgacccagcactgaggag

SEQ ID NO: 6380 - DNA, 25 bp, Homo sapiens
ggcggccaacgatgtcatcgtccac

SEQ ID NO: 6381 - DNA, 25 bp, Homo sapiens
gggatcctaccatggcaagaagagc

SEQ ID NO: 6382 - DNA, 25 bp, Homo sapiens
ggggaacagcggcatgggatcctac

SEQ ID NO: 6383 - DNA, 25 bp, Homo sapiens
tcaaccagcgtgagaagcccctggc

SEQ ID NO: 6384 - DNA, 25 bp, Homo sapiens
tgtgtcccatcggagtgcggaccac

SEQ ID NO: 6385 - DNA, 25 bp, Homo sapiens
aagtcccatgttactgctgtttgct

SEQ ID NO: 6386 - DNA, 25 bp, Homo sapiens
aatccttctcttgctcatttaagtc

SEQ ID NO: 6387 - DNA, 25 bp, Homo sapiens
acatttgcctttgagctccgagata

SEQ ID NO: 6388 - DNA, 25 bp, Homo sapiens
actgccctctgtttggaataagcca

SEQ ID NO: 6389 - DNA, 25 bp, Homo sapiens
caaatgcagcttctatttcacctga

SEQ ID NO: 6390 - DNA, 25 bp, Homo sapiens
cccgatatcaggttcttctttagac

SEQ ID NO: 6391 - DNA, 25 bp, Homo sapiens
gattttcaccatgtggcttcatcaa

SEQ ID NO: 6392 - DNA, 25 bp, Homo sapiens
gtcaatcttcagttatccccaaatg

SEQ ID NO: 6393 - DNA, 25 bp, Homo sapiens
tatgaaacccgctacatctatggcc

SEQ ID NO: 6394 - DNA, 25 bp, Homo sapiens
tccttttttgtgcctttcatcagaa

SEQ ID NO: 6395 - DNA, 25 bp, Homo sapiens
tgctgtttgcttttacttactttca

SEQ ID NO: 6396 - DNA, 25 bp, Homo sapiens
aatgtccccattctataaattcaac

SEQ ID NO: 6397 - DNA, 25 bp, Homo sapiens
catacatctaagtcagtttcacata

SEQ ID NO: 6398 - DNA, 25 bp, Homo sapiens
gagctataatgtttccctcaagaac

SEQ ID NO: 6399 - DNA, 25 bp, Homo sapiens
gatcgttctgggtcagcttgaatgt

SEQ ID NO: 6400 - DNA, 25 bp, Homo sapiens
gattggctttgcctttagcgtgtaa

SEQ ID NO: 6401 - DNA, 25 bp, Homo sapiens
gcctaggagttaatgatcgttctgg

SEQ ID NO: 6402 - DNA, 25 bp, Homo sapiens
ggaagcactgccattagactgaatt

SEQ ID NO: 6403 - DNA, 25 bp, Homo sapiens
ggagctatgagagatgtgtccatgt

SEQ ID NO: 6404 - DNA, 25 bp, Homo sapiens
gtagctagaatatcctatactggtt

SEQ ID NO: 6405 - DNA, 25 bp, Homo sapiens
gtattctgtggattctatatttcat

SEQ ID NO: 6406 - DNA, 25 bp, Homo sapiens
tgagtgggagattggctttgccttt

SEQ ID NO: 6407 - DNA, 25 bp, Homo sapiens
aaaacatctttccagtccttggtca

SEQ ID NO: 6408 - DNA, 25 bp, Homo sapiens
aagtgtattcacgtgcagcagcaac

SEQ ID NO: 6409 - DNA, 25 bp, Homo sapiens
caactttctcttgtaaacgtttcag

SEQ ID NO: 6410 - DNA, 25 bp, Homo sapiens
cagtattctgtaccatagcgctgct

SEQ ID NO: 6411 - DNA, 25 bp, Homo sapiens
cgctgctcttatgccatttgtttat

SEQ ID NO: 6412 - DNA, 25 bp, Homo sapiens
gagaatgccattctcttgggtgggt

SEQ ID NO: 6413 - DNA, 25 bp, Homo sapiens
gagggagagagcctataccccttac

SEQ ID NO: 6414 - DNA, 25 bp, Homo sapiens
gtccttggtcagtttggttgtgtaa

SEQ ID NO: 6415 - DNA, 25 bp, Homo sapiens
taccccttacttagcatgcacaaag

SEQ ID NO: 6416 - DNA, 25 bp, Homo sapiens
tgttattcgttttgtctacgtttag

SEQ ID NO: 6417 - DNA, 25 bp, Homo sapiens
tttccgtttccaggtgtttatagtg

SEQ ID NO: 6418 - DNA, 25 bp, Homo sapiens
aaaggccttatgtcgtgtacataca

SEQ ID NO: 6419 - DNA, 25 bp, Homo sapiens
agatcaatatactaggtctgccttc

SEQ ID NO: 6420 - DNA, 25 bp, Homo sapiens
atttcattgtgcatgcatccagtga

SEQ ID NO: 6421 - DNA, 25 bp, Homo sapiens
ctaggtctgccttcactttatagaa

SEQ ID NO: 6422 - DNA, 25 bp, Homo sapiens
gctgttgcttgctgaactgtgaaga

SEQ ID NO: 6423 - DNA, 25 bp, Homo sapiens
ggaagtgctattttcctatggactt

SEQ ID NO: 6424 - DNA, 25 bp, Homo sapiens
gtaccattgccaatcacctttttgg

SEQ ID NO: 6425 - DNA, 25 bp, Homo sapiens
tcctatggacttttgcattatttca

SEQ ID NO: 6426 - DNA, 25 bp, Homo sapiens
tctatcatttgctgttgcttgctga

SEQ ID NO: 6427 - DNA, 25 bp, Homo sapiens
tttaagctgctttctgtaccattgc

SEQ ID NO: 6428 - DNA, 25 bp, Homo sapiens
tttgtgatctagtttattgcttgta

SEQ ID NO: 6429 - DNA, 25 bp, Homo sapiens
agacttgggaagcctgacatttcta

SEQ ID NO: 6430 - DNA, 25 bp, Homo sapiens
ataacagtctgtttggccattacta

SEQ ID NO: 6431 - DNA, 25 bp, Homo sapiens
attcatgttgtaaccgcttcatatg

SEQ ID NO: 6432 - DNA, 25 bp, Homo sapiens
attgcactgacacttaagacttggg

SEQ ID NO: 6433 - DNA, 25 bp, Homo sapiens
ctgagaagctttctctgctgcagct

SEQ ID NO: 6434 - DNA, 25 bp, Homo sapiens
gaccatcctgtgttgtaagtacccg

SEQ ID NO: 6435 - DNA, 25 bp, Homo sapiens
gactatcttatgtcaggaccttcat

SEQ ID NO: 6436 - DNA, 25 bp, Homo sapiens
ggaccttcatgtgccaaacgtcagt

SEQ ID NO: 6437 - DNA, 25 bp, Homo sapiens
ggtaacttctcactagtcaggctag

SEQ ID NO: 6438 - DNA, 25 bp, Homo sapiens
gttgagctacattcttcattgcttt

SEQ ID NO: 6439 - DNA, 25 bp, Homo sapiens
tggccattactacactttttacttt

SEQ ID NO: 6440 - DNA, 25 bp, Homo sapiens
aaccatagctgacctttgtagtaga

SEQ ID NO: 6441 - DNA, 25 bp, Homo sapiens
aagcctctcactaagtatgatctat

SEQ ID NO: 6442 - DNA, 25 bp, Homo sapiens
agtcgttagttcgaaagcctctcac

SEQ ID NO: 6443 - DNA, 25 bp, Homo sapiens
ataaactatattctgtgacatgcta

SEQ ID NO: 6444 - DNA, 25 bp, Homo sapiens
gatctaagttgcatctttaatcctg

SEQ ID NO: 6445 - DNA, 25 bp, Homo sapiens
tcactgaatctaaccatagctgacc

SEQ ID NO: 6446 - DNA, 25 bp, Homo sapiens
tctatcctttaaactcttccactag

SEQ ID NO: 6447 - DNA, 25 bp, Homo sapiens
tcttccactagacgttgtaatgcac

SEQ ID NO: 6448 - DNA, 25 bp, Homo sapiens
tctttaatcctggtggtcttgcctt

SEQ ID NO: 6449 - DNA, 25 bp, Homo sapiens
tgctatattcaaaattcaacccatt

SEQ ID NO: 6450 - DNA, 25 bp, Homo sapiens
ttgtaatgcacacttatttttttcc

SEQ ID NO: 6451 - DNA, 25 bp, Homo sapiens
aaaggaatccagttctcatcaccct

SEQ ID NO: 6452 - DNA, 25 bp, Homo sapiens
agaatctggcatcttcacaaataca

SEQ ID NO: 6453 - DNA, 25 bp, Homo sapiens
agagaggccatgctaaatctcgccc

SEQ ID NO: 6454 - DNA, 25 bp, Homo sapiens
cagttctcatcaccctgggatagct

SEQ ID NO: 6455 - DNA, 25 bp, Homo sapiens
gaggagactccacatttgaaagcaa

SEQ ID NO: 6456 - DNA, 25 bp, Homo sapiens
gaggccggaagtgaagccgatcatg

SEQ ID NO: 6457 - DNA, 25 bp, Homo sapiens
gagtctaggggctcagaatctggca

SEQ ID NO: 6458 - DNA, 25 bp, Homo sapiens
tcccttcccgtggtaaatcttcaag

SEQ ID NO: 6459 - DNA, 25 bp, Homo sapiens
tgaaggaacacatagcaccaagaga

SEQ ID NO: 6460 - DNA, 25 bp, Homo sapiens
tgggatagctgaattcccttcccgt

SEQ ID NO: 6461 - DNA, 25 bp, Homo sapiens
ttcgacactgcctcaactggaaaaa

SEQ ID NO: 6462 - DNA, 25 bp, Homo sapiens
agacccccgaaggctgtgaacaagt

SEQ ID NO: 6463 - DNA, 25 bp, Homo sapiens
aggaaaaggtgtcttgctggcttgc

SEQ ID NO: 6464 - DNA, 25 bp, Homo sapiens
cagaacctggtacccagaggtgccc

SEQ ID NO: 6465 - DNA, 25 bp, Homo sapiens
ctggcttgcctcttgcaattcaata

SEQ ID NO: 6466 - DNA, 25 bp, Homo sapiens
gacagcgcaagacaatccactttgg

SEQ ID NO: 6467 - DNA, 25 bp, Homo sapiens
gctatggtgtggttggtccccaaag

SEQ ID NO: 6468 - DNA, 25 bp, Homo sapiens
gttgagcctgaaaatgtcaccatcc

SEQ ID NO: 6469 - DNA, 25 bp, Homo sapiens
tcctctgtgtggctcatgtttttgc

SEQ ID NO: 6470 - DNA, 25 bp, Homo sapiens
tgtcaccatccaatgtgattctggc

SEQ ID NO: 6471 - DNA, 25 bp, Homo sapiens
tgtggctcatgtttttgcttttcaa

SEQ ID NO: 6472 - DNA, 25 bp, Homo sapiens
ttggtccccaaagtatcacttgctc

SEQ ID NO: 6473 - DNA, 25 bp, Homo sapiens
caagaagagcatcgggcagcggcac

SEQ ID NO: 6474 - DNA, 25 bp, Homo sapiens
catgaacacagagagggcctaaccg

SEQ ID NO: 6475 - DNA, 25 bp, Homo sapiens
ccaggacgaggccatgcagccctgg

SEQ ID NO: 6476 - DNA, 25 bp, Homo sapiens
ctgcgccatgccaacgagcgcatgc

SEQ ID NO: 6477 - DNA, 25 bp, Homo sapiens
gagggcctaaccgagatcagtattt

SEQ ID NO: 6478 - DNA, 25 bp, Homo sapiens
gatccagtacctgatggacctcggc

SEQ ID NO: 6479 - DNA, 25 bp, Homo sapiens
gccagccaagactgggcccatgaac

SEQ ID NO: 6480 - DNA, 25 bp, Homo sapiens
gctctggaagttcattcgcgatttc

SEQ ID NO: 6481 - DNA, 25 bp, Homo sapiens
gtgggtcaccaagctctggaagttc

SEQ ID NO: 6482 - DNA, 25 bp, Homo sapiens
tccctccccgataaagaatgttcta

SEQ ID NO: 6483 - DNA, 25 bp, Homo sapiens
tcgcgatttcctgcggtggtgacgt

SEQ ID NO: 6484 - DNA, 25 bp, Homo sapiens
agatgagccgtaacagcagcctcgg

SEQ ID NO: 6485 - DNA, 25 bp, Homo sapiens
agattccgctgtgggggcaataaga

SEQ ID NO: 6486 - DNA, 25 bp, Homo sapiens
agctgggaagccaagcatggccctg

SEQ ID NO: 6487 - DNA, 25 bp, Homo sapiens
cactgcactggggccagctgggaag

SEQ ID NO: 6488 - DNA, 25 bp, Homo sapiens
cagcccattcacctggggaaatgac

SEQ ID NO: 6489 - DNA, 25 bp, Homo sapiens
catcctcctcagcagaagattccgc

SEQ ID NO: 6490 - DNA, 25 bp, Homo sapiens
gactgggttgtcgatggacggtggc

SEQ ID NO: 6491 - DNA, 25 bp, Homo sapiens
ggaagctccagactcaatgtgaccc

SEQ ID NO: 6492 - DNA, 25 bp, Homo sapiens
tatgagaccgttcgcaatgggggcc

SEQ ID NO: 6493 - DNA, 25 bp, Homo sapiens
tcactgccagcgcttgggctgaagg

SEQ ID NO: 6494 - DNA, 25 bp, Homo sapiens
tggacccgttctactatgactatga

SEQ ID NO: 6495 - DNA, 25 bp, Homo sapiens
aagtttagctagcccactatttgtt

SEQ ID NO: 6496 - DNA, 25 bp, Homo sapiens
agttcatttaactgtactctgcaca

SEQ ID NO: 6497 - DNA, 25 bp, Homo sapiens
catctttctgctgaccattttagtg

SEQ ID NO: 6498 - DNA, 25 bp, Homo sapiens
cctcattttatctcacctttttggg

SEQ ID NO: 6499 - DNA, 25 bp, Homo sapiens
cttattttccactaaacacagacac

SEQ ID NO: 6500 - DNA, 25 bp, Homo sapiens
gaggttgttccaaagacattcaggt

SEQ ID NO: 6501 - DNA, 25 bp, Homo sapiens
gccctgcaaaaatattggacctagc

SEQ ID NO: 6502 - DNA, 25 bp, Homo sapiens
gggggtgagagctctagttcattta

SEQ ID NO: 6503 - DNA, 25 bp, Homo sapiens
gtaatatggtacactgtcctctaag

SEQ ID NO: 6504 - DNA, 25 bp, Homo sapiens
tactctgcacaatagctaggatgac

SEQ ID NO: 6505 - DNA, 25 bp, Homo sapiens
tcctctaagggacatcctcatttta

SEQ ID NO: 6506 - DNA, 25 bp, Homo sapiens
agcagcttacttagtaggctctgtc

SEQ ID NO: 6507 - DNA, 25 bp, Homo sapiens
agtaactgtgcatctggtctgtacc

SEQ ID NO: 6508 - DNA, 25 bp, Homo sapiens
cttggcccttctgatcatgtatgca

SEQ ID NO: 6509 - DNA, 25 bp, Homo sapiens
ctttgtcttgcccctaggaaggtga

SEQ ID NO: 6510 - DNA, 25 bp, Homo sapiens
gaggaaagattcaactgcctctctt

SEQ ID NO: 6511 - DNA, 25 bp, Homo sapiens
gtcaccatacacattcttagattga

SEQ ID NO: 6512 - DNA, 25 bp, Homo sapiens
gtccttcgtctttgcatgtaagctc

SEQ ID NO: 6513 - DNA, 25 bp, Homo sapiens
tacggtttcttataactctcctttg

SEQ ID NO: 6514 - DNA, 25 bp, Homo sapiens
tctttttgggctttcatagtgttca

SEQ ID NO: 6515 - DNA, 25 bp, Homo sapiens
tgtctctgactaggtgtcaccatac

SEQ ID NO: 6516 - DNA, 25 bp, Homo sapiens
ttgccccatcacttagttctcaggc

SEQ ID NO: 6517 - DNA, 25 bp, Homo sapiens
atagctggtggtgggcgctaatcct

SEQ ID NO: 6518 - DNA, 25 bp, Homo sapiens
atgtccccaaaaagccgtgagtcag

SEQ ID NO: 6519 - DNA, 25 bp, Homo sapiens
catgctgtgtgccgggaacacccgg

SEQ ID NO: 6520 - DNA, 25 bp, Homo sapiens
cgtgtcacctactacttggactgga

SEQ ID NO: 6521 - DNA, 25 bp, Homo sapiens
ctacacgggagacgacgtccgcatc

SEQ ID NO: 6522 - DNA, 25 bp, Homo sapiens
gccacctgggtcactggaggaccaa

SEQ ID NO: 6523 - DNA, 25 bp, Homo sapiens
gtgagtcaggcctgggttggccacc

SEQ ID NO: 6524 - DNA, 25 bp, Homo sapiens
tccgcatcgtccgtgacgacatgct

SEQ ID NO: 6525 - DNA, 25 bp, Homo sapiens
tgacgcaaaataccaccttggcgcc

SEQ ID NO: 6526 - DNA, 25 bp, Homo sapiens
tggtcagctggggcgagggctgtgc

SEQ ID NO: 6527 - DNA, 25 bp, Homo sapiens
ttggactggatccaccactatgtcc

SEQ ID NO: 6528 - DNA, 25 bp, Homo sapiens
agaaaggccctcgaggcagagaccc

SEQ ID NO: 6529 - DNA, 25 bp, Homo sapiens
agaaatatgacatcaccacgctcag

SEQ ID NO: 6530 - DNA, 25 bp, Homo sapiens
agccaagggcaaagtcggcgggcgc

SEQ ID NO: 6531 - DNA, 25 bp, Homo sapiens
caagaagcagacagcccgagagatg

SEQ ID NO: 6532 - DNA, 25 bp, Homo sapiens
ctgtcaggggtctccctgacgtcct

SEQ ID NO: 6533 - DNA, 25 bp, Homo sapiens
gaggagggcagaggacgacctgaag

SEQ ID NO: 6534 - DNA, 25 bp, Homo sapiens
gctacctggccaaggctgaccagaa

SEQ ID NO: 6535 - DNA, 25 bp, Homo sapiens
gctcaacatcgatcaccttggtgaa

SEQ ID NO: 6536 - DNA, 25 bp, Homo sapiens
tacagcagctacctggccaaggctg

SEQ ID NO: 6537 - DNA, 25 bp, Homo sapiens
tcggcgggcgctggaagtagagagg

SEQ ID NO: 6538 - DNA, 25 bp, Homo sapiens
tgagagacgcaagccgctcaacatc

SEQ ID NO: 6539 - DNA, 25 bp, Homo sapiens
acaactcccagcagacaagttctct

SEQ ID NO: 6540 - DNA, 25 bp, Homo sapiens
agggggccttggaatctatagtata

SEQ ID NO: 6541 - DNA, 25 bp, Homo sapiens
atacccagagctaatgcaacatcca

SEQ ID NO: 6542 - DNA, 25 bp, Homo sapiens
caaagaacggcctacatacccagag

SEQ ID NO: 6543 - DNA, 25 bp, Homo sapiens
catccatttttcaccctacatgaat

SEQ ID NO: 6544 - DNA, 25 bp, Homo sapiens
gagataatttaaccctgcctctcag

SEQ ID NO: 6545 - DNA, 25 bp, Homo sapiens
gcagtggacttaatcggttgaccct

SEQ ID NO: 6546 - DNA, 25 bp, Homo sapiens
ggttgaccctactgtggattggtgg

SEQ ID NO: 6547 - DNA, 25 bp, Homo sapiens
gtggtagaggagccatcgccacaac

SEQ ID NO: 6548 - DNA, 25 bp, Homo sapiens
gttgactttacctcacagtgcttaa

SEQ ID NO: 6549 - DNA, 25 bp, Homo sapiens
tccttcgatttccctatgattcatg

SEQ ID NO: 6550 - DNA, 25 bp, Homo sapiens
aactccaacctattctgcaacagaa

SEQ ID NO: 6551 - DNA, 25 bp, Homo sapiens
acttatgccgtctcatatttttaca

SEQ ID NO: 6552 - DNA, 25 bp, Homo sapiens
aggaaagtgttgctgcgacaccacc

SEQ ID NO: 6553 - DNA, 25 bp, Homo sapiens
atttttccctgtttgcctataggtg

SEQ ID NO: 6554 - DNA, 25 bp, Homo sapiens
gaagactctgaagtatagctatacc

SEQ ID NO: 6555 - DNA, 25 bp, Homo sapiens
gacacttttaaagacaccgcaaatc

SEQ ID NO: 6556 - DNA, 25 bp, Homo sapiens
gtatatctttgcactgaagttgtct

SEQ ID NO: 6557 - DNA, 25 bp, Homo sapiens
gtgtctttttttacttatgccgtct

SEQ ID NO: 6558 - DNA, 25 bp, Homo sapiens
taagcctaagcctccttcgagaaga

SEQ ID NO: 6559 - DNA, 25 bp, Homo sapiens
tcgagaagagacccaactccaacct

SEQ ID NO: 6560 - DNA, 25 bp, Homo sapiens
tggaggtatcctgtgtgtctttttt

SEQ ID NO: 6561 - DNA, 25 bp, Homo sapiens
aaatttgggacctgcttcattcaag

SEQ ID NO: 6562 - DNA, 25 bp, Homo sapiens
aacttccagtatcattttccaatta

SEQ ID NO: 6563 - DNA, 25 bp, Homo sapiens
atcagtaatctgtcgcatttcatca

SEQ ID NO: 6564 - DNA, 25 bp, Homo sapiens
attttctttaggtcagaagcccatt

SEQ ID NO: 6565 - DNA, 25 bp, Homo sapiens
gaggacatttatgatgcagcagatg

SEQ ID NO: 6566 - DNA, 25 bp, Homo sapiens
gcagatgttgactaaaggcttggtt

SEQ ID NO: 6567 - DNA, 25 bp, Homo sapiens
ggacctgcttcattcaagcttcata

SEQ ID NO: 6568 - DNA, 25 bp, Homo sapiens
ggcttggttggtagatattcaggaa

SEQ ID NO: 6569 - DNA, 25 bp, Homo sapiens
gtaataaaactctgcacctaatccc

SEQ ID NO: 6570 - DNA, 25 bp, Homo sapiens
gttaactatgattccaattactact

SEQ ID NO: 6571 - DNA, 25 bp, Homo sapiens
ttccaattaattatcaagtctgttt

SEQ ID NO: 6572 - DNA, 25 bp, Homo sapiens
aataataccccaacagatgagcgaa

SEQ ID NO: 6573 - DNA, 25 bp, Homo sapiens
actgtatgtacataccggggctcct

SEQ ID NO: 6574 - DNA, 25 bp, Homo sapiens
agaccacagccgggtgtgtgtctgc

SEQ ID NO: 6575 - DNA, 25 bp, Homo sapiens
agagcccttgtggcgaggcattaaa

SEQ ID NO: 6576 - DNA, 25 bp, Homo sapiens
aggagggcttgagagctcagcctgc

SEQ ID NO: 6577 - DNA, 25 bp, Homo sapiens
cagcttctttctcggtggcagaaat

SEQ ID NO: 6578 - DNA, 25 bp, Homo sapiens
catatattgtgtggtttcccctttc

SEQ ID NO: 6579 - DNA, 25 bp, Homo sapiens
gagaaacggtcctttgttggcttct

SEQ ID NO: 6580 - DNA, 25 bp, Homo sapiens
gctcctctcctaacatatatgtata

SEQ ID NO: 6581 - DNA, 25 bp, Homo sapiens
gggaaaaaggacattggccccgcag

SEQ ID NO: 6582 - DNA, 25 bp, Homo sapiens
tcctcatttcctagacgtacgtcaa

SEQ ID NO: 6583 - DNA, 25 bp, Homo sapiens
aacttcacctcccgattctaagaag

SEQ ID NO: 6584 - DNA, 25 bp, Homo sapiens
aataccagcaactccgaagacatct

SEQ ID NO: 6585 - DNA, 25 bp, Homo sapiens
atatgacccagctgagaagccctca

SEQ ID NO: 6586 - DNA, 25 bp, Homo sapiens
atcaacctgtgccgaagcagtgcct

SEQ ID NO: 6587 - DNA, 25 bp, Homo sapiens
cagccacaactggccaagcagtact

SEQ ID NO: 6588 - DNA, 25 bp, Homo sapiens
catgctgggaaccttagctggggcc

SEQ ID NO: 6589 - DNA, 25 bp, Homo sapiens
ctccgaagacatcttgtcctcggcc

SEQ ID NO: 6590 - DNA, 25 bp, Homo sapiens
ctcctgtctgacatgtggtccagca

SEQ ID NO: 6591 - DNA, 25 bp, Homo sapiens
ctcggcctgctacactgtgaggaac

SEQ ID NO: 6592 - DNA, 25 bp, Homo sapiens
cttctccagcagcatgctcaacaac

SEQ ID NO: 6593 - DNA, 25 bp, Homo sapiens
gaactgcagggtgtcctcagacagc

SEQ ID NO: 6594 - DNA, 25 bp, Homo sapiens
aaagcatcattaagctcatggaaaa

SEQ ID NO: 6595 - DNA, 25 bp, Homo sapiens
aaagcccagagaaagcatcattaag

SEQ ID NO: 6596 - DNA, 25 bp, Homo sapiens
accctccagttatgaggctgccatg

SEQ ID NO: 6597 - DNA, 25 bp, Homo sapiens
cgagctttcagcgtgtcatcgaaac

SEQ ID NO: 6598 - DNA, 25 bp, Homo sapiens
ctgcagagatctgcccgagctttca

SEQ ID NO: 6599 - DNA, 25 bp, Homo sapiens
ctgcagctccgcttctgcagagatc

SEQ ID NO: 6600 - DNA, 25 bp, Homo sapiens
ctttcagcgtgtcatcgaaaccctc

SEQ ID NO: 6601 - DNA, 25 bp, Homo sapiens
gcccaaagctcactgtgtaattagc

SEQ ID NO: 6602 - DNA, 25 bp, Homo sapiens
gctgccatggaacttttcagccctg

SEQ ID NO: 6603 - DNA, 25 bp, Homo sapiens
ggacacaccctccagttatgaggct

SEQ ID NO: 6604 - DNA, 25 bp, Homo sapiens
tggaacttttcagccctgatcaaga

SEQ ID NO: 6605 - DNA, 25 bp, Homo sapiens
catgacaacgtctaaatctttacta

SEQ ID NO: 6606 - DNA, 25 bp, Homo sapiens
cctgctctcctgtgctgaaaagtga

SEQ ID NO: 6607 - DNA, 25 bp, Homo sapiens
ctggctgcagttaaatggtcttttg

SEQ ID NO: 6608 - DNA, 25 bp, Homo sapiens
gatttagtggtggactttaacctct

SEQ ID NO: 6609 - DNA, 25 bp, Homo sapiens
ggtctgagccatgttgctaggaaac

SEQ ID NO: 6610 - DNA, 25 bp, Homo sapiens
gtgactggatactgtacaggttcat

SEQ ID NO: 6611 - DNA, 25 bp, Homo sapiens
gtgtatgccaagttttcagtttctg

SEQ ID NO: 6612 - DNA, 25 bp, Homo sapiens
taaatctttactattcttctggcaa

SEQ ID NO: 6613 - DNA, 25 bp, Homo sapiens
taaatggtcttttgcattttgctct

SEQ ID NO: 6614 - DNA, 25 bp, Homo sapiens
ttttagctgcttactttctcatgaa

SEQ ID NO: 6615 - DNA, 25 bp, Homo sapiens
ttttctacaagagcatcacaacaac

SEQ ID NO: 6616 - DNA, 25 bp, Homo sapiens
aacaaggcagaaacggccgccaagc

SEQ ID NO: 6617 - DNA, 25 bp, Homo sapiens
acgaggagattgttccccagatcaa

SEQ ID NO: 6618 - DNA, 25 bp, Homo sapiens
caaggagcgtcggtacgcaggcctg

SEQ ID NO: 6619 - DNA, 25 bp, Homo sapiens
catcctggacggcacggaccagatg

SEQ ID NO: 6620 - DNA, 25 bp, Homo sapiens
cggcaagcgagtgctcattgcagcc

SEQ ID NO: 6621 - DNA, 25 bp, Homo sapiens
gccgccaagcacggggaggagcagg

SEQ ID NO: 6622 - DNA, 25 bp, Homo sapiens
gggatccccattgtgtatgagctga

SEQ ID NO: 6623 - DNA, 25 bp, Homo sapiens
gggatgtcagaccaggcgatcatgg

SEQ ID NO: 6624 - DNA, 25 bp, Homo sapiens
taagatcttggaggcgctccttcga

SEQ ID NO: 6625 - DNA, 25 bp, Homo sapiens
tcaatgagcggcattacgggggcct

SEQ ID NO: 6626 - DNA, 25 bp, Homo sapiens
tggtgcgcacttggcgcttcaatga

SEQ ID NO: 6627 - DNA, 25 bp, Homo sapiens
agaatgcgccagtgcgggtttgcgg

SEQ ID NO: 6628 - DNA, 25 bp, Homo sapiens
atttcataatgccttcagtaccgac

SEQ ID NO: 6629 - DNA, 25 bp, Homo sapiens
gacgcccagggaatgaactctagtt

SEQ ID NO: 6630 - DNA, 25 bp, Homo sapiens
gccgtagtgaccaggcctttttttg

SEQ ID NO: 6631 - DNA, 25 bp, Homo sapiens
ggacaggttgatgccagagccgtaa

SEQ ID NO: 6632 - DNA, 25 bp, Homo sapiens
gtatgtgtccttgtgccgtagtgac

SEQ ID NO: 6633 - DNA, 25 bp, Homo sapiens
tattaacttactcacacggacaggt

SEQ ID NO: 6634 - DNA, 25 bp, Homo sapiens
tcagtaccgacgtacacttctgacc

SEQ ID NO: 6635 - DNA, 25 bp, Homo sapiens
tgcaccgtccattttctagggatag

SEQ ID NO: 6636 - DNA, 25 bp, Homo sapiens
tgcacttttgttcatgctccaaaga

SEQ ID NO: 6637 - DNA, 25 bp, Homo sapiens
ttttggtggatgtgttaccccgcac

SEQ ID NO: 6638 - DNA, 25 bp, Homo sapiens
aatgggaagcccagcaataccacgc

SEQ ID NO: 6639 - DNA, 25 bp, Homo sapiens
agcgctgatcttctatttaattccc

SEQ ID NO: 6640 - DNA, 25 bp, Homo sapiens
cattcacagggctcttcagtatcag

SEQ ID NO: 6641 - DNA, 25 bp, Homo sapiens
ctccactttctcaaagcacactgga

SEQ ID NO: 6642 - DNA, 25 bp, Homo sapiens
ggagcattgcccacattcacagggc

SEQ ID NO: 6643 - DNA, 25 bp, Homo sapiens
gggctgtgaattctttcttcatccc

SEQ ID NO: 6644 - DNA, 25 bp, Homo sapiens
gtttgcttgcagtgctttcttaatt

SEQ ID NO: 6645 - DNA, 25 bp, Homo sapiens
tcatgtcatagaactgctgggccca

SEQ ID NO: 6646 - DNA, 25 bp, Homo sapiens
tggccaggtgtctggtttgggtcca

SEQ ID NO: 6647 - DNA, 25 bp, Homo sapiens
tgggtccagagtgctcatcatcatg

SEQ ID NO: 6648 - DNA, 25 bp, Homo sapiens
ttatggctcttctgggaaactcctc

SEQ ID NO: 6649 - DNA, 25 bp, Homo sapiens
agtaggggccactcatattctgggc

SEQ ID NO: 6650 - DNA, 25 bp, Homo sapiens
atgaagagcccctttaacaaccgct

SEQ ID NO: 6651 - DNA, 25 bp, Homo sapiens
caaatgggcatcgtctcatggggtg

SEQ ID NO: 6652 - DNA, 25 bp, Homo sapiens
caaccgctggtatcaaatgggcatc

SEQ ID NO: 6653 - DNA, 25 bp, Homo sapiens
cctgttgccttcagtgactacattc

SEQ ID NO: 6654 - DNA, 25 bp, Homo sapiens
ctccaggctggatacaaggggcggg

SEQ ID NO: 6655 - DNA, 25 bp, Homo sapiens
ggagacgtggacagccaacgttggt

SEQ ID NO: 6656 - DNA, 25 bp, Homo sapiens
ggcttctacacacatgtgttccgcc

SEQ ID NO: 6657 - DNA, 25 bp, Homo sapiens
gggggaccctttgtcatgaagagcc

SEQ ID NO: 6658 - DNA, 25 bp, Homo sapiens
gtgtctgcccgacagggagacggca

SEQ ID NO: 6659 - DNA, 25 bp, Homo sapiens
tggaccgggacattgccctgatgaa

SEQ ID NO: 6660 - DNA, 25 bp, Homo sapiens
aagggctgattgatggtgtccacac

SEQ ID NO: 6661 - DNA, 25 bp, Homo sapiens
agtcaccggatgtcagcacagacgc

SEQ ID NO: 6662 - DNA, 25 bp, Homo sapiens
atcagctgattgtcaccaggggctc

SEQ ID NO: 6663 - DNA, 25 bp, Homo sapiens
cacagtcacagtcacgcaggatggg

SEQ ID NO: 6664 - DNA, 25 bp, Homo sapiens
caccgtgactttctaggcttctacg

SEQ ID NO: 6665 - DNA, 25 bp, Homo sapiens
gcatcggcacgaaggttgtctgctg

SEQ ID NO: 6666 - DNA, 25 bp, Homo sapiens
ggaacaggccgtgcgagcactttca

SEQ ID NO: 6667 - DNA, 25 bp, Homo sapiens
gtgtccacactgactacattgtccc

SEQ ID NO: 6668 - DNA, 25 bp, Homo sapiens
taggcttctacgtggtggacagtca

SEQ ID NO: 6669 - DNA, 25 bp, Homo sapiens
tgctggttcgtccacaacaacggag

SEQ ID NO: 6670 - DNA, 25 bp, Homo sapiens
ttgtccccaacctgttttgagtaga

SEQ ID NO: 6671 - DNA, 25 bp, Homo sapiens
agctttgataattgtgtaccttaag

SEQ ID NO: 6672 - DNA, 25 bp, Homo sapiens
caatatccattctgtagacttttga

SEQ ID NO: 6673 - DNA, 25 bp, Homo sapiens
cccactttgtaatttttgctccaat

SEQ ID NO: 6674 - DNA, 25 bp, Homo sapiens
gaagggggagtaatgacttgtacaa

SEQ ID NO: 6675 - DNA, 25 bp, Homo sapiens
gaattgtatcaatttgtttgtgttc

SEQ ID NO: 6676 - DNA, 25 bp, Homo sapiens
gactatgaatattatcggattactg

SEQ ID NO: 6677 - DNA, 25 bp, Homo sapiens
gatgcccaatatattctgaccgtta

SEQ ID NO: 6678 - DNA, 25 bp, Homo sapiens
gtacaaacagtatttctggtgtata

SEQ ID NO: 6679 - DNA, 25 bp, Homo sapiens
gtttgtgttcaatatcagctttgat

SEQ ID NO: 6680 - DNA, 25 bp, Homo sapiens
taaaaacctgtatctgacccacttt

SEQ ID NO: 6681 - DNA, 25 bp, Homo sapiens
tttgcactctgtaattgcacttttt

SEQ ID NO: 6682 - DNA, 25 bp, Homo sapiens
aaatgctgcagggttttgctgttgc

SEQ ID NO: 6683 - DNA, 25 bp, Homo sapiens
aacttgcccatcgactttttgaata

SEQ ID NO: 6684 - DNA, 25 bp, Homo sapiens
aagagctggtcacacttcgttgaga

SEQ ID NO: 6685 - DNA, 25 bp, Homo sapiens
caacatcccaactgtggtcttcagc

SEQ ID NO: 6686 - DNA, 25 bp, Homo sapiens
gaaccaggagacacgtgtggcgggc

SEQ ID NO: 6687 - DNA, 25 bp, Homo sapiens
gcaatagctgctggccgaaaacttg

SEQ ID NO: 6688 - DNA, 25 bp, Homo sapiens
taccaacgtcaaaggcatctatgca

SEQ ID NO: 6689 - DNA, 25 bp, Homo sapiens
tattcaacgagctttaccccgatgt

SEQ ID NO: 6690 - DNA, 25 bp, Homo sapiens
ttaccccgatgtatcacgcagttac

SEQ ID NO: 6691 - DNA, 25 bp, Homo sapiens
ttcaccctacctcttcagaagagct

SEQ ID NO: 6692 - DNA, 25 bp, Homo sapiens
tttgacaacacagtcgccattcacc

SEQ ID NO: 6693 - DNA, 25 bp, Homo sapiens
aaacctcatgccctgttgataaacc

SEQ ID NO: 6694 - DNA, 25 bp, Homo sapiens
ccccaggactgcacgaaggtttaca

SEQ ID NO: 6695 - DNA, 25 bp, Homo sapiens
ctctgacctcatgtgcgtggatgtc

SEQ ID NO: 6696 - DNA, 25 bp, Homo sapiens
gaaaaacgcctgcaatggtgactca

SEQ ID NO: 6697 - DNA, 25 bp, Homo sapiens
gaaaaagcatcgctaacgccacact

SEQ ID NO: 6698 - DNA, 25 bp, Homo sapiens
gacccaggagtctacactcaagtgt

SEQ ID NO: 6699 - DNA, 25 bp, Homo sapiens
gccaggctgtcatccatggtgaaga

SEQ ID NO: 6700 - DNA, 25 bp, Homo sapiens
ggaccgttggtgtgcagaggtaccc

SEQ ID NO: 6701 - DNA, 25 bp, Homo sapiens
ggtgaagaaagtcaggctgccctcc

SEQ ID NO: 6702 - DNA, 25 bp, Homo sapiens
taccacgagcccagatgtgaccttt

SEQ ID NO: 6703 - DNA, 25 bp, Homo sapiens
tgcgtggatgtcaagctcatctccc

SEQ ID NO: 6704 - DNA, 25 bp, Homo sapiens
aaaccccgagatagtgctggaacac

SEQ ID NO: 6705 - DNA, 25 bp, Homo sapiens
atccctcggcaaagaatctactgga

SEQ ID NO: 6706 - DNA, 25 bp, Homo sapiens
cctatggctctgcaattgtcaccgg

SEQ ID NO: 6707 - DNA, 25 bp, Homo sapiens
gccacacggcaggtagcagggggag

SEQ ID NO: 6708 - DNA, 25 bp, Homo sapiens
gcctgctgctgttatctttttaact

SEQ ID NO: 6709 - DNA, 25 bp, Homo sapiens
gtacgcccctgtgtgatatgttgat

SEQ ID NO: 6710 - DNA, 25 bp, Homo sapiens
gtcctgcgaacaggtgctgctggcg

SEQ ID NO: 6711 - DNA, 25 bp, Homo sapiens
gtttcatggacggtttcaccacact

SEQ ID NO: 6712 - DNA, 25 bp, Homo sapiens
gttttctcatgatgcctttttatat

SEQ ID NO: 6713 - DNA, 25 bp, Homo sapiens
tgaggttctggagatccccgaaccc

SEQ ID NO: 6714 - DNA, 25 bp, Homo sapiens
ttgtcaccggttaactgtggcctgt

SEQ ID NO: 6715 - DNA, 25 bp, Homo sapiens
aaacagtgccttctagagccgggct

SEQ ID NO: 6716 - DNA, 25 bp, Homo sapiens
aactcactgcctaggaggctggcca

SEQ ID NO: 6717 - DNA, 25 bp, Homo sapiens
aggcaacactttagcttgggtccac

SEQ ID NO: 6718 - DNA, 25 bp, Homo sapiens
atcaaacatgcacacgggcgagctt

SEQ ID NO: 6719 - DNA, 25 bp, Homo sapiens
caatattaacacgctgcctggtctg

SEQ ID NO: 6720 - DNA, 25 bp, Homo sapiens
gccgggctgggaatggggacacggt

SEQ ID NO: 6721 - DNA, 25 bp, Homo sapiens
ggacaagcagtcccttaatattgag

SEQ ID NO: 6722 - DNA, 25 bp, Homo sapiens
ggcagaggtgcaagacctagtcccc

SEQ ID NO: 6723 - DNA, 25 bp, Homo sapiens
tagcttgggtccaccatgcagaaca

SEQ ID NO: 6724 - DNA, 25 bp, Homo sapiens
tctgtctggatcccgaggtatggca

SEQ ID NO: 6725 - DNA, 25 bp, Homo sapiens
tgatggaagatggtccgtgcccagg

SEQ ID NO: 6726 - DNA, 25 bp, Homo sapiens
aattcttcgatatttctgtagcttg

SEQ ID NO: 6727 - DNA, 25 bp, Homo sapiens
acacgaagaatctccttcatcgcca

SEQ ID NO: 6728 - DNA, 25 bp, Homo sapiens
acatactgtatacctcgtgttaggc

SEQ ID NO: 6729 - DNA, 25 bp, Homo sapiens
cgagcatgctattccagtgtactga

SEQ ID NO: 6730 - DNA, 25 bp, Homo sapiens
ctttgtttccaatcgagcatgctat

SEQ ID NO: 6731 - DNA, 25 bp, Homo sapiens
gatacaagtggcatttttctggaca

SEQ ID NO: 6732 - DNA, 25 bp, Homo sapiens
gggactcatctttgaacacaacacg

SEQ ID NO: 6733 - DNA, 25 bp, Homo sapiens
ggttaagtaccaattctgccgacaa

SEQ ID NO: 6734 - DNA, 25 bp, Homo sapiens
gtctacttcatgccaatgagctact

SEQ ID NO: 6735 - DNA, 25 bp, Homo sapiens
tcctcaacaggggctggttttgcca

SEQ ID NO: 6736 - DNA, 25 bp, Homo sapiens
tgatttcgggccttcccgctaaaat

SEQ ID NO: 6737 - DNA, 25 bp, Homo sapiens
aatctacccatggctacagttgata

SEQ ID NO: 6738 - DNA, 25 bp, Homo sapiens
aatttcgaaaagcagttacagacct

SEQ ID NO: 6739 - DNA, 25 bp, Homo sapiens
agaaaagacgagatcccccaaatgg

SEQ ID NO: 6740 - DNA, 25 bp, Homo sapiens
atacctttgctggagatacttgtca

SEQ ID NO: 6741 - DNA, 25 bp, Homo sapiens
gagatacttgtcaagttgctcttaa

SEQ ID NO: 6742 - DNA, 25 bp, Homo sapiens
gatcccccaaatggtcctaatctac

SEQ ID NO: 6743 - DNA, 25 bp, Homo sapiens
gtgggaacaagagctatacaataac

SEQ ID NO: 6744 - DNA, 25 bp, Homo sapiens
tacccatggctacagttgatataaa

SEQ ID NO: 6745 - DNA, 25 bp, Homo sapiens
tagtcctagaggatattttcatacc

SEQ ID NO: 6746 - DNA, 25 bp, Homo sapiens
tgggccgtcgacaaaggaaatctga

SEQ ID NO: 6747 - DNA, 25 bp, Homo sapiens
ttcatacctttgctggagatacttg

SEQ ID NO: 6748 - DNA, 25 bp, Homo sapiens
acaaaagaagcccggctcctggtca

SEQ ID NO: 6749 - DNA, 25 bp, Homo sapiens
acttggctcacactcgacatgaaaa

SEQ ID NO: 6750 - DNA, 25 bp, Homo sapiens
caagttcctctaacttggctcacac

SEQ ID NO: 6751 - DNA, 25 bp, Homo sapiens
cctcagattccttcccatggaggga

SEQ ID NO: 6752 - DNA, 25 bp, Homo sapiens
cctggtcacctaggaagcctcagat

SEQ ID NO: 6753 - DNA, 25 bp, Homo sapiens
cttggcctgctaaggtcttggaact

SEQ ID NO: 6754 - DNA, 25 bp, Homo sapiens
gcctctctctagggtacatggtgct

SEQ ID NO: 6755 - DNA, 25 bp, Homo sapiens
ggaagtctcatctggggagcaggca

SEQ ID NO: 6756 - DNA, 25 bp, Homo sapiens
ggagggagggagtggtttgcaggtg

SEQ ID NO: 6757 - DNA, 25 bp, Homo sapiens
gtggtttgcaggtggccaagttcct

SEQ ID NO: 6758 - DNA, 25 bp, Homo sapiens
taaggtcttggaacttgcctgcctt

SEQ ID NO: 6759 - DNA, 25 bp, Homo sapiens
atgtctgcaagttcactgactagtg

SEQ ID NO: 6760 - DNA, 25 bp, Homo sapiens
cacacagggcaccgagcccaatgga

SEQ ID NO: 6761 - DNA, 25 bp, Homo sapiens
cactgtgcgagcctgtcgagaagca

SEQ ID NO: 6762 - DNA, 25 bp, Homo sapiens
gagaatattcgcttaattcccccaa

SEQ ID NO: 6763 - DNA, 25 bp, Homo sapiens
gcagcctgtgtttggtgtgcaactc

SEQ ID NO: 6764 - DNA, 25 bp, Homo sapiens
gctactcatacgtctggattgggct

SEQ ID NO: 6765 - DNA, 25 bp, Homo sapiens
ggacagatgcagatctggcctgcca

SEQ ID NO: 6766 - DNA, 25 bp, Homo sapiens
ggtgtgcaactcatcatgggcatga

SEQ ID NO: 6767 - DNA, 25 bp, Homo sapiens
gtcatttcagtctcttcattttgtc

SEQ ID NO: 6768 - DNA, 25 bp, Homo sapiens
tgccagaagcggccctctggaaacc

SEQ ID NO: 6769 - DNA, 25 bp, Homo sapiens
tgctatgccttgtttttgtcaccaa

SEQ ID NO: 6770 - DNA, 25 bp, Homo sapiens
aaaccaacagcgatctcaagcttaa

SEQ ID NO: 6771 - DNA, 25 bp, Homo sapiens
agtccagaccagaactcggtccttc

SEQ ID NO: 6772 - DNA, 25 bp, Homo sapiens
cacgccaggagctcaaactattctc

SEQ ID NO: 6773 - DNA, 25 bp, Homo sapiens
cagaagaggaattctcacctcccca

SEQ ID NO: 6774 - DNA, 25 bp, Homo sapiens
ccggaggcaaagagaccgggccgcg

SEQ ID NO: 6775 - DNA, 25 bp, Homo sapiens
gagggactggggcctcgaagggatt

SEQ ID NO: 6776 - DNA, 25 bp, Homo sapiens
gcaaccactgcagcgactagggaca

SEQ ID NO: 6777 - DNA, 25 bp, Homo sapiens
gcctcgaagggattcctggagcagc

SEQ ID NO: 6778 - DNA, 25 bp, Homo sapiens
tgcagggcaatatgggccacgccag

SEQ ID NO: 6779 - DNA, 25 bp, Homo sapiens
tggaagggggcaagccgctcatgtc

SEQ ID NO: 6780 - DNA, 25 bp, Homo sapiens
tggacttggggtcctaagtggggag

SEQ ID NO: 6781 - DNA, 25 bp, Homo sapiens
aaattctgatgccattgtcttctgc

SEQ ID NO: 6782 - DNA, 25 bp, Homo sapiens
aatgttcagtgtcggggcacggaga

SEQ ID NO: 6783 - DNA, 25 bp, Homo sapiens
atagctggggccatcatgactgcag

SEQ ID NO: 6784 - DNA, 25 bp, Homo sapiens
ccgcatgctgggttactccaaagga

SEQ ID NO: 6785 - DNA, 25 bp, Homo sapiens
gaggccgggctgaagtttactacag

SEQ ID NO: 6786 - DNA, 25 bp, Homo sapiens
gaggtgaaaactcagtgtccgtcag

SEQ ID NO: 6787 - DNA, 25 bp, Homo sapiens
gcactgggcagatctggctggataa

SEQ ID NO: 6788 - DNA, 25 bp, Homo sapiens
ggcacggagagtaccctgtggagct

SEQ ID NO: 6789 - DNA, 25 bp, Homo sapiens
ggtacctgggggacaatttgcgatg

SEQ ID NO: 6790 - DNA, 25 bp, Homo sapiens
gtgtccgtcaggattgtcggcagta

SEQ ID NO: 6791 - DNA, 25 bp, Homo sapiens
tgctcccgaggtgtcctcgggctca

SEQ ID NO: 6792 - DNA, 25 bp, Homo sapiens
aggatgcactgagcagcgtgcagga

SEQ ID NO: 6793 - DNA, 25 bp, Homo sapiens
caccaagaccgccaaggatgcactg

SEQ ID NO: 6794 - DNA, 25 bp, Homo sapiens
ccctgaaagactactggagcaccgt

SEQ ID NO: 6795 - DNA, 25 bp, Homo sapiens
ccgatggcttcagttccctgaaaga

SEQ ID NO: 6796 - DNA, 25 bp, Homo sapiens
gaccgccaaggatgcactgagcagc

SEQ ID NO: 6797 - DNA, 25 bp, Homo sapiens
gactactggagcaccgttaaggaca

SEQ ID NO: 6798 - DNA, 25 bp, Homo sapiens
gcaccgttaaggacaagttctctga

SEQ ID NO: 6799 - DNA, 25 bp, Homo sapiens
ggaccctgaggtcagaccaacttca

SEQ ID NO: 6800 - DNA, 25 bp, Homo sapiens
tgcccgagcttcagaggccgaggat

SEQ ID NO: 6801 - DNA, 25 bp, Homo sapiens
tggcctctgcccgagcttcagaggc

SEQ ID NO: 6802 - DNA, 25 bp, Homo sapiens
ttcagaggccgaggatgcctccctt

SEQ ID NO: 6803 - DNA, 25 bp, Homo sapiens
acagaagaacttacgctcggcgtcc

SEQ ID NO: 6804 - DNA, 25 bp, Homo sapiens
cagtactcacctcagcaattagcag

SEQ ID NO: 6805 - DNA, 25 bp, Homo sapiens
cagtatatggttcccttgcatctgt

SEQ ID NO: 6806 - DNA, 25 bp, Homo sapiens
ctcagagaggacacccatcatttgg

SEQ ID NO: 6807 - DNA, 25 bp, Homo sapiens
gcaactgagcatattccaagccctg

SEQ ID NO: 6808 - DNA, 25 bp, Homo sapiens
gcatctgttctagcacagtactcac

SEQ ID NO: 6809 - DNA, 25 bp, Homo sapiens
ggcaccagatgtcttcgctgaaaac

SEQ ID NO: 6810 - DNA, 25 bp, Homo sapiens
tccaagccctgccaagaaagtacca

SEQ ID NO: 6811 - DNA, 25 bp, Homo sapiens
tccccagggttcaatagattcactc

SEQ ID NO: 6812 - DNA, 25 bp, Homo sapiens
ttatggttctggtttggctgccact

SEQ ID NO: 6813 - DNA, 25 bp, Homo sapiens
tttggtcaactatattccccagggt

SEQ ID NO: 6814 - DNA, 25 bp, Homo sapiens
aatcatattgaatgtttccaacctg

SEQ ID NO: 6815 - DNA, 25 bp, Homo sapiens
agtgcctgtgtggatttttgtgaaa

SEQ ID NO: 6816 - DNA, 25 bp, Homo sapiens
atctttcttttgattcttcctaaca

SEQ ID NO: 6817 - DNA, 25 bp, Homo sapiens
ccagccaactcattgggttgtagcc

SEQ ID NO: 6818 - DNA, 25 bp, Homo sapiens
gctgagtttaacatgtgtggtcttg

SEQ ID NO: 6819 - DNA, 25 bp, Homo sapiens
ggttgtagccaaaggttcactctca

SEQ ID NO: 6820 - DNA, 25 bp, Homo sapiens
gtctttcttagtgcctgtgtggatt

SEQ ID NO: 6821 - DNA, 25 bp, Homo sapiens
gtgacatttgtctaatagcctaata

SEQ ID NO: 6822 - DNA, 25 bp, Homo sapiens
taaaaccccagccaactcattgggt

SEQ ID NO: 6823 - DNA, 25 bp, Homo sapiens
tataccaatgcttttatcaaacaga

SEQ ID NO: 6824 - DNA, 25 bp, Homo sapiens
tttccattcccaatctagtgctaga

SEQ ID NO: 6825 - DNA, 25 bp, Homo sapiens
aagattgtccagtgcaaccacacac

SEQ ID NO: 6826 - DNA, 25 bp, Homo sapiens
agagaacggatggcgagtcccgagc

SEQ ID NO: 6827 - DNA, 25 bp, Homo sapiens
ccacacacgctcaccagaagttgtg

SEQ ID NO: 6828 - DNA, 25 bp, Homo sapiens
ccgtcgcagtgccgaggagtatgag

SEQ ID NO: 6829 - DNA, 25 bp, Homo sapiens
cgccccgtaggcagctgagggtatc

SEQ ID NO: 6830 - DNA, 25 bp, Homo sapiens
cgccctgctggcaagatacatccag

SEQ ID NO: 6831 - DNA, 25 bp, Homo sapiens
gaaagctccttctggacgaatgtcc

SEQ ID NO: 6832 - DNA, 25 bp, Homo sapiens
gaatgtccatcgttaagaacctgca

SEQ ID NO: 6833 - DNA, 25 bp, Homo sapiens
gacaacaatcacactcataactcat

SEQ ID NO: 6834 - DNA, 25 bp, Homo sapiens
gctggatggattttggccgtcgcag

SEQ ID NO: 6835 - DNA, 25 bp, Homo sapiens
gtatgagtacccctcctagaggacc

SEQ ID NO: 6836 - DNA, 25 bp, Homo sapiens
attgaaatgttcgttttctcctgcc

SEQ ID NO: 6837 - DNA, 25 bp, Homo sapiens
caaatgggctgctgcttagcttgca

SEQ ID NO: 6838 - DNA, 25 bp, Homo sapiens
gaaaatcgatgcagccatttctgat

SEQ ID NO: 6839 - DNA, 25 bp, Homo sapiens
gatcttcacagttggagtttgaccc

SEQ ID NO: 6840 - DNA, 25 bp, Homo sapiens
ggggaagcactcgtgtgcaacagac

SEQ ID NO: 6841 - DNA, 25 bp, Homo sapiens
gtatcttgccggtcatttttatgtt

SEQ ID NO: 6842 - DNA, 25 bp, Homo sapiens
gtgactcgagtcacactcaagggaa

SEQ ID NO: 6843 - DNA, 25 bp, Homo sapiens
taattcttcacctaagtctctgtga

SEQ ID NO: 6844 - DNA, 25 bp, Homo sapiens
tgagcgtgaatctgtatcttgccgg

SEQ ID NO: 6845 - DNA, 25 bp, Homo sapiens
ttagcttgcaccttgtcacatagag

SEQ ID NO: 6846 - DNA, 25 bp, Homo sapiens
tttatttctttactggatcttcaca

SEQ ID NO: 6847 - DNA, 25 bp, Homo sapiens
aactataggactcgtgcttctcgta

SEQ ID NO: 6848 - DNA, 25 bp, Homo sapiens
agagccagccaatcacttagctcct

SEQ ID NO: 6849 - DNA, 25 bp, Homo sapiens
atcacagcttccttgtcggagggga

SEQ ID NO: 6850 - DNA, 25 bp, Homo sapiens
caggaactggcaggcctcagggtac

SEQ ID NO: 6851 - DNA, 25 bp, Homo sapiens
gaaaccaaagggcaggcacggcagc

SEQ ID NO: 6852 - DNA, 25 bp, Homo sapiens
gaaagggctgcactggaacaacaca

SEQ ID NO: 6853 - DNA, 25 bp, Homo sapiens
gcacggcagcaaacgcctgagtgct

SEQ ID NO: 6854 - DNA, 25 bp, Homo sapiens
gcttctcgtacgctgggctataatc

SEQ ID NO: 6855 - DNA, 25 bp, Homo sapiens
tgaattttcaacacagactccctgc

SEQ ID NO: 6856 - DNA, 25 bp, Homo sapiens
tgctgccttcggtgactatatgaga

SEQ ID NO: 6857 - DNA, 25 bp, Homo sapiens
ttatctggaatcactttgcctctaa

SEQ ID NO: 6858 - DNA, 25 bp, Homo sapiens
aaggacagatgatcgtgttccattt

SEQ ID NO: 6859 - DNA, 25 bp, Homo sapiens
aagtcccatattctggtatgctcca

SEQ ID NO: 6860 - DNA, 25 bp, Homo sapiens
aataatgtaaatcaacgcccctcct

SEQ ID NO: 6861 - DNA, 25 bp, Homo sapiens
aatgaccttcattctgagaccaaag

SEQ ID NO: 6862 - DNA, 25 bp, Homo sapiens
ccaagaccagatggatgcccagatg

SEQ ID NO: 6863 - DNA, 25 bp, Homo sapiens
cccctcctttagggatctagctctt

SEQ ID NO: 6864 - DNA, 25 bp, Homo sapiens
gaacctggtgaaagtcccatattct

SEQ ID NO: 6865 - DNA, 25 bp, Homo sapiens
gagaagagtaaaagtccaccagcgg

SEQ ID NO: 6866 - DNA, 25 bp, Homo sapiens
ggcctcagatgtttggagctttgga

SEQ ID NO: 6867 - DNA, 25 bp, Homo sapiens
gggatctagctcttcgagtggatca

SEQ ID NO: 6868 - DNA, 25 bp, Homo sapiens
tccaccagcggaatttatgcgtatg

SEQ ID NO: 6869 - DNA, 25 bp, Homo sapiens
aactgactgatagactctgagcact

SEQ ID NO: 6870 - DNA, 25 bp, Homo sapiens
acaggaatcctcagagcaattctct

SEQ ID NO: 6871 - DNA, 25 bp, Homo sapiens
atagtaccgataacagccatgcact

SEQ ID NO: 6872 - DNA, 25 bp, Homo sapiens
ctgcacaggagagcaaggcacttgc

SEQ ID NO: 6873 - DNA, 25 bp, Homo sapiens
cttgcagtagtgatctatgccagca

SEQ ID NO: 6874 - DNA, 25 bp, Homo sapiens
gaaaaccagagagtcccattttaag

SEQ ID NO: 6875 - DNA, 25 bp, Homo sapiens
gccaaaatatctcccaactgactga

SEQ ID NO: 6876 - DNA, 25 bp, Homo sapiens
gggtgacattaactgacatttgctt

SEQ ID NO: 6877 - DNA, 25 bp, Homo sapiens
gtaacagcagaatctcttgacatta

SEQ ID NO: 6878 - DNA, 25 bp, Homo sapiens
tgagtaaaatcccttgttcttttgg

SEQ ID NO: 6879 - DNA, 25 bp, Homo sapiens
ttttgtggcagatgtttttcctaaa

SEQ ID NO: 6880 - DNA, 25 bp, Homo sapiens
aggtcagaatgcttacgggtgttat

SEQ ID NO: 6881 - DNA, 25 bp, Homo sapiens
caaagggctctttaaaatcatattt

SEQ ID NO: 6882 - DNA, 25 bp, Homo sapiens
cagaatgcttacgggtgttattttt

SEQ ID NO: 6883 - DNA, 25 bp, Homo sapiens
gaaatactcagcttaggcattttta

SEQ ID NO: 6884 - DNA, 25 bp, Homo sapiens
gctcattattttttgcacactcaca

SEQ ID NO: 6885 - DNA, 25 bp, Homo sapiens
taagttgttgaattccttaatttag

SEQ ID NO: 6886 - DNA, 25 bp, Homo sapiens
tattcatttgaggatgtcttataaa

SEQ ID NO: 6887 - DNA, 25 bp, Homo sapiens
tcaatggcatttgaaccaccaaaaa

SEQ ID NO: 6888 - DNA, 25 bp, Homo sapiens
tgcatagaattgttaccaacctcca

SEQ ID NO: 6889 - DNA, 25 bp, Homo sapiens
tgttaccaacctccaaagggctctt

SEQ ID NO: 6890 - DNA, 25 bp, Homo sapiens
ttctctctcagaaatcaatggcatt

SEQ ID NO: 6891 - DNA, 25 bp, Homo sapiens
aggcatgtcatctatgctccaagca

SEQ ID NO: 6892 - DNA, 25 bp, Homo sapiens
attgcttccaagttcagtgagagac

SEQ ID NO: 6893 - DNA, 25 bp, Homo sapiens
caggcagctgcagagactttgagtg

SEQ ID NO: 6894 - DNA, 25 bp, Homo sapiens
gaaagcaaagtggacccttccaagg

SEQ ID NO: 6895 - DNA, 25 bp, Homo sapiens
gacagatttatgttgcagccttcac

SEQ ID NO: 6896 - DNA, 25 bp, Homo sapiens
gcagccttcacagtgcaggcagctg

SEQ ID NO: 6897 - DNA, 25 bp, Homo sapiens
gctccaagcagccacaacaagtatg

SEQ ID NO: 6898 - DNA, 25 bp, Homo sapiens
ggttaccagacaggcctttttatag

SEQ ID NO: 6899 - DNA, 25 bp, Homo sapiens
gtatgcaggggagtcattcccagga

SEQ ID NO: 6900 - DNA, 25 bp, Homo sapiens
gtgagagactccaggactttgacaa

SEQ ID NO: 6901 - DNA, 25 bp, Homo sapiens
tcatttgattcacttttttctgcag

SEQ ID NO: 6902 - DNA, 25 bp, Homo sapiens
aggtgataggacttacgcatcccca

SEQ ID NO: 6903 - DNA, 25 bp, Homo sapiens
atcgctgtgtgtctgtaaaccctga

SEQ ID NO: 6904 - DNA, 25 bp, Homo sapiens
atggaccactatactcggggaggca

SEQ ID NO: 6905 - DNA, 25 bp, Homo sapiens
atgtacagactccctgggatcctca

SEQ ID NO: 6906 - DNA, 25 bp, Homo sapiens
ccctctgggatttctttgtcatgta

SEQ ID NO: 6907 - DNA, 25 bp, Homo sapiens
cgtccccacactctaggtgatagga

SEQ ID NO: 6908 - DNA, 25 bp, Homo sapiens
ggcctgggacctttttaagatcgct

SEQ ID NO: 6909 - DNA, 25 bp, Homo sapiens
gggtgacaggacctatggaccacta

SEQ ID NO: 6910 - DNA, 25 bp, Homo sapiens
tatggctgtgttgtcacatctgtcc

SEQ ID NO: 6911 - DNA, 25 bp, Homo sapiens
tgatatctgattccccagtgaggcc

SEQ ID NO: 6912 - DNA, 25 bp, Homo sapiens
tgttatcatctcagatctcttcgcc

SEQ ID NO: 6913 - DNA, 25 bp, Homo sapiens
actgcaggggattccctgagcctcc

SEQ ID NO: 6914 - DNA, 25 bp, Homo sapiens
gagaatttgcaccagcttactctcc

SEQ ID NO: 6915 - DNA, 25 bp, Homo sapiens
gatgcttcgatagggcactctggca

SEQ ID NO: 6916 - DNA, 25 bp, Homo sapiens
gcctcctcggtgaggtagaccacta

SEQ ID NO: 6917 - DNA, 25 bp, Homo sapiens
ggcaagttctcagagggcactgcag

SEQ ID NO: 6918 - DNA, 25 bp, Homo sapiens
ggtcgctatgcagtgtctgatgctg

SEQ ID NO: 6919 - DNA, 25 bp, Homo sapiens
gtatgcatcctgttaccgatcaaat

SEQ ID NO: 6920 - DNA, 25 bp, Homo sapiens
tccacagtgggaggccctttaccac

SEQ ID NO: 6921 - DNA, 25 bp, Homo sapiens
tgacgctgaccacgattcaagcaac

SEQ ID NO: 6922 - DNA, 25 bp, Homo sapiens
tgatgctgccgcccacaaatatggc

SEQ ID NO: 6923 - DNA, 25 bp, Homo sapiens
tgtgcagtgattgtccacggtgcct

SEQ ID NO: 6924 - DNA, 25 bp, Homo sapiens
actggcacgaagtgcctcatctctg

SEQ ID NO: 6925 - DNA, 25 bp, Homo sapiens
ccacccccaatacgacaggaagact

SEQ ID NO: 6926 - DNA, 25 bp, Homo sapiens
ccactggcacgaagtgcctcatctc

SEQ ID NO: 6927 - DNA, 25 bp, Homo sapiens
ccccaatacgacaggaagactctga

SEQ ID NO: 6928 - DNA, 25 bp, Homo sapiens
ctcacgtgcagtaatcaacgcccgc

SEQ ID NO: 6929 - DNA, 25 bp, Homo sapiens
ctctcctcacgtgcagtaatcaacg

SEQ ID NO: 6930 - DNA, 25 bp, Homo sapiens
gaaatggattaagaacaccatagct

SEQ ID NO: 6931 - DNA, 25 bp, Homo sapiens
gcaaggattcatgtcagggtgattc

SEQ ID NO: 6932 - DNA, 25 bp, Homo sapiens
ggattcatgtcagggtgattctggt

SEQ ID NO: 6933 - DNA, 25 bp, Homo sapiens
gggaggcaaggattcatgtcagggt

SEQ ID NO: 6934 - DNA, 25 bp, Homo sapiens
tccagccactggcacgaagtgcctc

SEQ ID NO: 6935 - DNA, 25 bp, Homo sapiens
acaagtcctgggacactggatcccc

SEQ ID NO: 6936 - DNA, 25 bp, Homo sapiens
actgtgcaagcctgacttcatgctc

SEQ ID NO: 6937 - DNA, 25 bp, Homo sapiens
cacccaggcggagggtgccttcgtg

SEQ ID NO: 6938 - DNA, 25 bp, Homo sapiens
ctagactatgtctccaactcagttc

SEQ ID NO: 6939 - DNA, 25 bp, Homo sapiens
ctggtcctgcaattactatgaagtc

SEQ ID NO: 6940 - DNA, 25 bp, Homo sapiens
gagcagtgctaatgctggctactgt

SEQ ID NO: 6941 - DNA, 25 bp, Homo sapiens
gatgtctagaactggtcctgcaatt

SEQ ID NO: 6942 - DNA, 25 bp, Homo sapiens
tcctccctaatgagtttgcatcgct

SEQ ID NO: 6943 - DNA, 25 bp, Homo sapiens
tctccaactcagttcagaccatctc

SEQ ID NO: 6944 - DNA, 25 bp, Homo sapiens
tgcatcgctgatcttcagtaccttc

SEQ ID NO: 6945 - DNA, 25 bp, Homo sapiens
tggatccccgagcagtgctaatgct

SEQ ID NO: 6946 - DNA, 25 bp, Homo sapiens
aacagtatatcacagacctttccaa

SEQ ID NO: 6947 - DNA, 25 bp, Homo sapiens
aactgcagtaacagaaacctttctt

SEQ ID NO: 6948 - DNA, 25 bp, Homo sapiens
acatctggaggattttagtctttct

SEQ ID NO: 6949 - DNA, 25 bp, Homo sapiens
atcttggccatgtcactggtcattg

SEQ ID NO: 6950 - DNA, 25 bp, Homo sapiens
attctcagaccacaggaaactcttc

SEQ ID NO: 6951 - DNA, 25 bp, Homo sapiens
gaaccaactttgtacatcttggcca

SEQ ID NO: 6952 - DNA, 25 bp, Homo sapiens
gaacctaggagagtcaacatctgga

SEQ ID NO: 6953 - DNA, 25 bp, Homo sapiens
gaactttctctgacaaactaactgc

SEQ ID NO: 6954 - DNA, 25 bp, Homo sapiens
ggacttaaagagcacatcctgataa

SEQ ID NO: 6955 - DNA, 25 bp, Homo sapiens
gtatactacttgatggaaccaactt

SEQ ID NO: 6956 - DNA, 25 bp, Homo sapiens
tttagtctttcttacacatatgtgt

SEQ ID NO: 6957 - DNA, 25 bp, Homo sapiens
aaagcgtaccttgatataccccatc

SEQ ID NO: 6958 - DNA, 25 bp, Homo sapiens
aattgtgccttgcctgagtgagctt

SEQ ID NO: 6959 - DNA, 25 bp, Homo sapiens
atcttccttcactgatagctgcagc

SEQ ID NO: 6960 - DNA, 25 bp, Homo sapiens
caagcacttttggccagaaaccctt

SEQ ID NO: 6961 - DNA, 25 bp, Homo sapiens
cccatcgacctcagcaagcaattag

SEQ ID NO: 6962 - DNA, 25 bp, Homo sapiens
gagtctacttgaagcagatccattc

SEQ ID NO: 6963 - DNA, 25 bp, Homo sapiens
gccagaaacccttgctgcatttaca

SEQ ID NO: 6964 - DNA, 25 bp, Homo sapiens
gtcataggcttctgcacgttggatc

SEQ ID NO: 6965 - DNA, 25 bp, Homo sapiens
tggaagcacttccagaacttcacct

SEQ ID NO: 6966 - DNA, 25 bp, Homo sapiens
ttcacctccatatcagaagtgccaa

SEQ ID NO: 6967 - DNA, 25 bp, Homo sapiens
ttgcctggcaaactatactgtgaac

SEQ ID NO: 6968 - DNA, 25 bp, Homo sapiens
agacctagggtgtggacagctcctt

SEQ ID NO: 6969 - DNA, 25 bp, Homo sapiens
agctccttgcatcttaacactgtgc

SEQ ID NO: 6970 - DNA, 25 bp, Homo sapiens
caagaccgaggtcgatttgtcccag

SEQ ID NO: 6971 - DNA, 25 bp, Homo sapiens
caccacccacatgacatttcaagca

SEQ ID NO: 6972 - DNA, 25 bp, Homo sapiens
ctgtttcattagctctagttctccc

SEQ ID NO: 6973 - DNA, 25 bp, Homo sapiens
gcagttccagcgtgaggtttgtttc

SEQ ID NO: 6974 - DNA, 25 bp, Homo sapiens
tagttacactagctcatcctattcc

SEQ ID NO: 6975 - DNA, 25 bp, Homo sapiens
tcaagtcctctggtggcagttccag

SEQ ID NO: 6976 - DNA, 25 bp, Homo sapiens
tcagtggcaatctcagttcccttgc

SEQ ID NO: 6977 - DNA, 25 bp, Homo sapiens
ttgtcccagccttaccggagaaaag

SEQ ID NO: 6978 - DNA, 25 bp, Homo sapiens
tttgtttctaccacttattccggag

SEQ ID NO: 6979 - DNA, 25 bp, Homo sapiens
aatgtgtagccggaaggggcgctcc

SEQ ID NO: 6980 - DNA, 25 bp, Homo sapiens
agacctgccgcctgggaatcaggat

SEQ ID NO: 6981 - DNA, 25 bp, Homo sapiens
agctaccatttcaatagccccatct

SEQ ID NO: 6982 - DNA, 25 bp, Homo sapiens
cacaaccctgttgctacatcagagt

SEQ ID NO: 6983 - DNA, 25 bp, Homo sapiens
gaagttggccaatcagaagcggttc

SEQ ID NO: 6984 - DNA, 25 bp, Homo sapiens
gagctgttctttttgactgattgtt

SEQ ID NO: 6985 - DNA, 25 bp, Homo sapiens
gcccggaagtcggccaggaagttgg

SEQ ID NO: 6986 - DNA, 25 bp, Homo sapiens
ggcaatacttggtcctgagcatgca

SEQ ID NO: 6987 - DNA, 25 bp, Homo sapiens
tgaacctggggttttgacttgccac

SEQ ID NO: 6988 - DNA, 25 bp, Homo sapiens
ttgccactgccataacttgtttgta

SEQ ID NO: 6989 - DNA, 25 bp, Homo sapiens
ttttgtaattcctctagctaccatt

SEQ ID NO: 6990 - DNA, 25 bp, Homo sapiens
aagatgcaaatcaactctctcctgg

SEQ ID NO: 6991 - DNA, 25 bp, Homo sapiens
aagtagccaacagcgaagccagtcc

SEQ ID NO: 6992 - DNA, 25 bp, Homo sapiens
aatctctgtttaggtgcctctactt

SEQ ID NO: 6993 - DNA, 25 bp, Homo sapiens
atgacaggaagcgacgcctctggca

SEQ ID NO: 6994 - DNA, 25 bp, Homo sapiens
gaacagaaatccacgctcaatctca

SEQ ID NO: 6995 - DNA, 25 bp, Homo sapiens
gccagtccagaagaggggtccgctg

SEQ ID NO: 6996 - DNA, 25 bp, Homo sapiens
taaaagagagctgcccacaacttgc

SEQ ID NO: 6997 - DNA, 25 bp, Homo sapiens
tcttcgccatgggggtctttgaaca

SEQ ID NO: 6998 - DNA, 25 bp, Homo sapiens
ttcattcagcgtgcttggtccgaca

SEQ ID NO: 6999 - DNA, 25 bp, Homo sapiens
ttggtccgacatgccttgaaaccag

SEQ ID NO: 7000 - DNA, 25 bp, Homo sapiens
tttgtctacggaagcctctgggtga

SEQ ID NO: 7001 - DNA, 25 bp, Homo sapiens
aactgggagggatgccgagcttgct

SEQ ID NO: 7002 - DNA, 25 bp, Homo sapiens
atccctaatctttaagcccgacttg

SEQ ID NO: 7003 - DNA, 25 bp, Homo sapiens
ctatccagagagagtccccaggtac

SEQ ID NO: 7004 - DNA, 25 bp, Homo sapiens
gagcagctggaagtttgggtttggt

SEQ ID NO: 7005 - DNA, 25 bp, Homo sapiens
gaggtggtgccacagggtggggcaa

SEQ ID NO: 7006 - DNA, 25 bp, Homo sapiens
gagtccccaggtacaacaaatgcta

SEQ ID NO: 7007 - DNA, 25 bp, Homo sapiens
gatgacagcaaattaaccccctgga

SEQ ID NO: 7008 - DNA, 25 bp, Homo sapiens
gccggggcaaccaagctgtatgggg

SEQ ID NO: 7009 - DNA, 25 bp, Homo sapiens
ggatgccgagcttgctggaactact

SEQ ID NO: 7010 - DNA, 25 bp, Homo sapiens
tctaaggcctctggggtctttgcct

SEQ ID NO: 7011 - DNA, 25 bp, Homo sapiens
tgtggatggggcggagcagggcaga

SEQ ID NO: 7012 - DNA, 25 bp, Homo sapiens
aattttcaagggcactctcaaacca

SEQ ID NO: 7013 - DNA, 25 bp, Homo sapiens
atgtgatcaacccaactttacctag

SEQ ID NO: 7014 - DNA, 25 bp, Homo sapiens
ctcaccctcacaccgtgttaggaga

SEQ ID NO: 7015 - DNA, 25 bp, Homo sapiens
ctcttacaacgtcttcactgcaaac

SEQ ID NO: 7016 - DNA, 25 bp, Homo sapiens
gacacatactagtttctttgttcgg

SEQ ID NO: 7017 - DNA, 25 bp, Homo sapiens
gatagcatcgtcaaccctgatggct

SEQ ID NO: 7018 - DNA, 25 bp, Homo sapiens
ggagactactgttatttgaccaatg

SEQ ID NO: 7019 - DNA, 25 bp, Homo sapiens
ggatgttggggacttgcagatggtt

SEQ ID NO: 7020 - DNA, 25 bp, Homo sapiens
ggtataaggtatctgtcacactgtc

SEQ ID NO: 7021 - DNA, 25 bp, Homo sapiens
gtcagggaggaagttctgctcaccc

SEQ ID NO: 7022 - DNA, 25 bp, Homo sapiens
tcccttgtccaagtggaggctgccc

SEQ ID NO: 7023 - DNA, 25 bp, Homo sapiens
aagctgtggggtgttacgcatgcct

SEQ ID NO: 7024 - DNA, 25 bp, Homo sapiens
cactccccgcttgtgtttacacaag

SEQ ID NO: 7025 - DNA, 25 bp, Homo sapiens
catttgcatcattactgccttcacc

SEQ ID NO: 7026 - DNA, 25 bp, Homo sapiens
ctatgcacctgcaggcacgtgtgta

SEQ ID NO: 7027 - DNA, 25 bp, Homo sapiens
gcaaaaggatgtgtgtctttctccc

SEQ ID NO: 7028 - DNA, 25 bp, Homo sapiens
gtgccatctcttgtgtatgcagggc

SEQ ID NO: 7029 - DNA, 25 bp, Homo sapiens
tccaggcctgtgtgctttgtagagc

SEQ ID NO: 7030 - DNA, 25 bp, Homo sapiens
tcgctctttttgatggccacataat

SEQ ID NO: 7031 - DNA, 25 bp, Homo sapiens
tgtagagccagctgcttgctcacag

SEQ ID NO: 7032 - DNA, 25 bp, Homo sapiens
tgttccccttcattgaaaaccacca

SEQ ID NO: 7033 - DNA, 25 bp, Homo sapiens
ttgaaaaccaccacggtgccatctc

SEQ ID NO: 7034 - DNA, 25 bp, Homo sapiens
aacttccttagtgcctgtgacaaaa

SEQ ID NO: 7035 - DNA, 25 bp, Homo sapiens
acagactaccacaagcagagccatg

SEQ ID NO: 7036 - DNA, 25 bp, Homo sapiens
gaggtccataataggcatgatcgac

SEQ ID NO: 7037 - DNA, 25 bp, Homo sapiens
gatcgacatgtttcacaaatacacc

SEQ ID NO: 7038 - DNA, 25 bp, Homo sapiens
gattgacaagccaagcctgctgacg

SEQ ID NO: 7039 - DNA, 25 bp, Homo sapiens
gattgatttttctgagtttctgtcc

SEQ ID NO: 7040 - DNA, 25 bp, Homo sapiens
gcaacactcaagctgagaggtccat

SEQ ID NO: 7041 - DNA, 25 bp, Homo sapiens
gccaagcctgctgacgatgatgaag

SEQ ID NO: 7042 - DNA, 25 bp, Homo sapiens
gtttctgtccttgctgggagacata

SEQ ID NO: 7043 - DNA, 25 bp, Homo sapiens
tgggagacatagccacagactacca

SEQ ID NO: 7044 - DNA, 25 bp, Homo sapiens
ttacctcgccgacgtctttgagaaa

SEQ ID NO: 7045 - DNA, 25 bp, Homo sapiens
aagtcaagcttgggctctcaaagcc

SEQ ID NO: 7046 - DNA, 25 bp, Homo sapiens
agatactcagcactagactaacata

SEQ ID NO: 7047 - DNA, 25 bp, Homo sapiens
ctcgcctgcatagctaatcctgtta

SEQ ID NO: 7048 - DNA, 25 bp, Homo sapiens
ctgggcagttgctgtggcgacagga

SEQ ID NO: 7049 - DNA, 25 bp, Homo sapiens
gaaggggattcactacagggactta

SEQ ID NO: 7050 - DNA, 25 bp, Homo sapiens
gacaacttctcaaagcacaacgtgc

SEQ ID NO: 7051 - DNA, 25 bp, Homo sapiens
gagagttcctccatttaccaaaatt

SEQ ID NO: 7052 - DNA, 25 bp, Homo sapiens
taacaggtcactacacgggtgcaga

SEQ ID NO: 7053 - DNA, 25 bp, Homo sapiens
tagagaacagtctcttttctgcctt

SEQ ID NO: 7054 - DNA, 25 bp, Homo sapiens
ttgcgtaaagtgaggctcgcctgca

SEQ ID NO: 7055 - DNA, 25 bp, Homo sapiens
tttgacacgcacacattcttcaggg

SEQ ID NO: 7056 - DNA, 25 bp, Homo sapiens
aacagcctattaccgtggggccatg

SEQ ID NO: 7057 - DNA, 25 bp, Homo sapiens
ctactcctgggacaatgcacaagtt

SEQ ID NO: 7058 - DNA, 25 bp, Homo sapiens
gacagtctaccgtcacgagaagcgg

SEQ ID NO: 7059 - DNA, 25 bp, Homo sapiens
gactgggctactcagatcaagacct

SEQ ID NO: 7060 - DNA, 25 bp, Homo sapiens
gccatgggcttcattctgatgtatg

SEQ ID NO: 7061 - DNA, 25 bp, Homo sapiens
gcgggtgaaactgcagatctgggac

SEQ ID NO: 7062 - DNA, 25 bp, Homo sapiens
gctgcagcagaactgctcatgctag

SEQ ID NO: 7063 - DNA, 25 bp, Homo sapiens
gggttgttcccactgagaagggcca

SEQ ID NO: 7064 - DNA, 25 bp, Homo sapiens
gtaaggcaggcctttgagcgcctgg

SEQ ID NO: 7065 - DNA, 25 bp, Homo sapiens
gtccttcaatgctgtccaagactgg

SEQ ID NO: 7066 - DNA, 25 bp, Homo sapiens
tctgattcgctggacacagacccgt

SEQ ID NO: 7067 - DNA, 25 bp, Homo sapiens
aatcggaattcaagcatctcccatt

SEQ ID NO: 7068 - DNA, 25 bp, Homo sapiens
aggcctgtttatctacactgctgcc

SEQ ID NO: 7069 - DNA, 25 bp, Homo sapiens
atacttcctaggtggtgctgggtac

SEQ ID NO: 7070 - DNA, 25 bp, Homo sapiens
atctcccattgtcccacaaatgttt

SEQ ID NO: 7071 - DNA, 25 bp, Homo sapiens
atgctgtacctggatcattctgaag

SEQ ID NO: 7072 - DNA, 25 bp, Homo sapiens
cttcttgttgcatcctgtcaggagg

SEQ ID NO: 7073 - DNA, 25 bp, Homo sapiens
gctgggtgggtttggagttcttggc

SEQ ID NO: 7074 - DNA, 25 bp, Homo sapiens
gctggtgcctctctattggtaatgt

SEQ ID NO: 7075 - DNA, 25 bp, Homo sapiens
tccacacacggccaggcctgtttat

SEQ ID NO: 7076 - DNA, 25 bp, Homo sapiens
tccgagcattacatcattttgtcca

SEQ ID NO: 7077 - DNA, 25 bp, Homo sapiens
ttgctggttgaaatcccgaggtgtc

SEQ ID NO: 7078 - DNA, 25 bp, Homo sapiens
aattcctctccaggccagaataatt

SEQ ID NO: 7079 - DNA, 25 bp, Homo sapiens
ccttctctggtctccttgagatgat

SEQ ID NO: 7080 - DNA, 25 bp, Homo sapiens
gaataattggcatgtctcctcaacc

SEQ ID NO: 7081 - DNA, 25 bp, Homo sapiens
gacacagggatgattcccacccaaa

SEQ ID NO: 7082 - DNA, 25 bp, Homo sapiens
ggagcttgcttgcagatggtctgag

SEQ ID NO: 7083 - DNA, 25 bp, Homo sapiens
gtctcacccaactgcagtttactat

SEQ ID NO: 7084 - DNA, 25 bp, Homo sapiens
gttcttgtgtcctggtaattcctct

SEQ ID NO: 7085 - DNA, 25 bp, Homo sapiens
gtttgtcgagcatttcttctactct

SEQ ID NO: 7086 - DNA, 25 bp, Homo sapiens
tgcccagcccatttgggctctggtt

SEQ ID NO: 7087 - DNA, 25 bp, Homo sapiens
ttagggctgcttaggtctcatggac

SEQ ID NO: 7088 - DNA, 25 bp, Homo sapiens
ttgttaaatcctttgcttcattcca

SEQ ID NO: 7089 - DNA, 25 bp, Homo sapiens
aagtctgatccctgccaaaaagtgg

SEQ ID NO: 7090 - DNA, 25 bp, Homo sapiens
acagagctagaggccatgtctcctg

SEQ ID NO: 7091 - DNA, 25 bp, Homo sapiens
agcgcagagaaatcggtgtctgacg

SEQ ID NO: 7092 - DNA, 25 bp, Homo sapiens
cggtgtctgacgattttggaaatga

SEQ ID NO: 7093 - DNA, 25 bp, Homo sapiens
ctagcatttagatctacactctcga

SEQ ID NO: 7094 - DNA, 25 bp, Homo sapiens
gacaccaggcaagaaaagcgcagag

SEQ ID NO: 7095 - DNA, 25 bp, Homo sapiens
gtggctggaagagtcccttagtact

SEQ ID NO: 7096 - DNA, 25 bp, Homo sapiens
tacactctcgagttaaagatgggga

SEQ ID NO: 7097 - DNA, 25 bp, Homo sapiens
tccctgtcctgacaccaggcaagaa

SEQ ID NO: 7098 - DNA, 25 bp, Homo sapiens
tcccttagtactcttctagcattta

SEQ ID NO: 7099 - DNA, 25 bp, Homo sapiens
tgagttcactctccgaagtctgatc

SEQ ID NO: 7100 - DNA, 25 bp, Homo sapiens
aactggagaccaggatccgagagct

SEQ ID NO: 7101 - DNA, 25 bp, Homo sapiens
acacagagtctgttaagggcctgag

SEQ ID NO: 7102 - DNA, 25 bp, Homo sapiens
agaatctcaagtcaacaagctccgc

SEQ ID NO: 7103 - DNA, 25 bp, Homo sapiens
agggcctgaggaagtatgagcggag

SEQ ID NO: 7104 - DNA, 25 bp, Homo sapiens
atattttcttgattcctgaccattg

SEQ ID NO: 7105 - DNA, 25 bp, Homo sapiens
gcgctaagactcgagacttcacctc

SEQ ID NO: 7106 - DNA, 25 bp, Homo sapiens
ggccgaggaacgtgcggatatcgca

SEQ ID NO: 7107 - DNA, 25 bp, Homo sapiens
ggctgatgaacaagccaatgctcat

SEQ ID NO: 7108 - DNA, 25 bp, Homo sapiens
gggtcaaggagctgacgtaccagag

SEQ ID NO: 7109 - DNA, 25 bp, Homo sapiens
tcaagtcctacaagaggcaggcgga

SEQ ID NO: 7110 - DNA, 25 bp, Homo sapiens
tgctcatctcaccaaattccggaaa

SEQ ID NO: 7111 - DNA, 25 bp, Homo sapiens
aaacgtatgtgaagcctctcttgaa

SEQ ID NO: 7112 - DNA, 25 bp, Homo sapiens
aaaggctacctggatcaggcttcag

SEQ ID NO: 7113 - DNA, 25 bp, Homo sapiens
aaatgaccaggtgtggctccagctt

SEQ ID NO: 7114 - DNA, 25 bp, Homo sapiens
atactatttttcataccacgtgcat

SEQ ID NO: 7115 - DNA, 25 bp, Homo sapiens
gagtcaaatggcctatactcctctg

SEQ ID NO: 7116 - DNA, 25 bp, Homo sapiens
gcttcagggagtgccatcatcgatc

SEQ ID NO: 7117 - DNA, 25 bp, Homo sapiens
gggactcatgtttgggtaggcctgt

SEQ ID NO: 7118 - DNA, 25 bp, Homo sapiens
gtacaccccacagagctaatctaaa

SEQ ID NO: 7119 - DNA, 25 bp, Homo sapiens
gtggctccaatgtgagtacacccca

SEQ ID NO: 7120 - DNA, 25 bp, Homo sapiens
taccccaccctacaaaatgcatatg

SEQ ID NO: 7121 - DNA, 25 bp, Homo sapiens
tctcaggattcctagtggctccaat

SEQ ID NO: 7122 - DNA, 25 bp, Homo sapiens
aatgtgaaaatctttgtcactccat

SEQ ID NO: 7123 - DNA, 25 bp, Homo sapiens
aattccggaggatccagcacgagct

SEQ ID NO: 7124 - DNA, 25 bp, Homo sapiens
acgtcaacctctccaaattccggag

SEQ ID NO: 7125 - DNA, 25 bp, Homo sapiens
agaagcgcaatgttgaagctgtcaa

SEQ ID NO: 7126 - DNA, 25 bp, Homo sapiens
ctttgtcactccattttgtacttat

SEQ ID NO: 7127 - DNA, 25 bp, Homo sapiens
gaagctgtcaagggtctacgcaaac

SEQ ID NO: 7128 - DNA, 25 bp, Homo sapiens
gcaaaggtgaaatcctacaagagac

SEQ ID NO: 7129 - DNA, 25 bp, Homo sapiens
gcggaggaacaatccaacgtcaacc

SEQ ID NO: 7130 - DNA, 25 bp, Homo sapiens
gctgagggtgaagagcagggaggtt

SEQ ID NO: 7131 - DNA, 25 bp, Homo sapiens
gtggacaagctgcaagcaaaggtga

SEQ ID NO: 7132 - DNA, 25 bp, Homo sapiens
tatctaactgctgaaaggtgaccaa

SEQ ID NO: 7133 - DNA, 25 bp, Homo sapiens
acaagtcggaactgggatgcctgcg

SEQ ID NO: 7134 - DNA, 25 bp, Homo sapiens
agaaggtttatgccacccttgaggc

SEQ ID NO: 7135 - DNA, 25 bp, Homo sapiens
cagccaggcaggtttgccaagctgc

SEQ ID NO: 7136 - DNA, 25 bp, Homo sapiens
caggatgacccctgggcaggtgtgt

SEQ ID NO: 7137 - DNA, 25 bp, Homo sapiens
cctgcgagccattgtactctttaac

SEQ ID NO: 7138 - DNA, 25 bp, Homo sapiens
gcagaagtatccggaacagccaggc

SEQ ID NO: 7139 - DNA, 25 bp, Homo sapiens
gctctgcgttccattggcttgaaat

SEQ ID NO: 7140 - DNA, 25 bp, Homo sapiens
tctggccacgggtttacatgtccac

SEQ ID NO: 7141 - DNA, 25 bp, Homo sapiens
tggcttgaaatgcctggagcacctc

SEQ ID NO: 7142 - DNA, 25 bp, Homo sapiens
tgtactctttaacccagatgccaag

SEQ ID NO: 7143 - DNA, 25 bp, Homo sapiens
ttgacagagttctaactgagctggt

SEQ ID NO: 7144 - DNA, 25 bp, Homo sapiens
attgtccggtttgtcttggatatat

SEQ ID NO: 7145 - DNA, 25 bp, Homo sapiens
attgtgctcagagacactgttgata

SEQ ID NO: 7146 - DNA, 25 bp, Homo sapiens
ccacagtgcctattgatacttgggg

SEQ ID NO: 7147 - DNA, 25 bp, Homo sapiens
gatgcctttttttctctgcatttaa

SEQ ID NO: 7148 - DNA, 25 bp, Homo sapiens
gcagtctactagattgtgatccctt

SEQ ID NO: 7149 - DNA, 25 bp, Homo sapiens
gggaagaactattgtgctcagagac

SEQ ID NO: 7150 - DNA, 25 bp, Homo sapiens
gggagggtgcttggcacttattgaa

SEQ ID NO: 7151 - DNA, 25 bp, Homo sapiens
tagtctaaggccatggcatcccttt

SEQ ID NO: 7152 - DNA, 25 bp, Homo sapiens
tgatcggccatcaagggaagaacta

SEQ ID NO: 7153 - DNA, 25 bp, Homo sapiens
tggcatccctttttcataaattatt

SEQ ID NO: 7154 - DNA, 25 bp, Homo sapiens
ttatttaattgtccggtttgtcttg

SEQ ID NO: 7155 - DNA, 25 bp, Homo sapiens
caacaaattacgtggcttacccctg

SEQ ID NO: 7156 - DNA, 25 bp, Homo sapiens
cctgacctatgtcatcacctgtcaa

SEQ ID NO: 7157 - DNA, 25 bp, Homo sapiens
gacttcgcaacactggggttcaggt

SEQ ID NO: 7158 - DNA, 25 bp, Homo sapiens
gatggactcatgtatgtcacccgac

SEQ ID NO: 7159 - DNA, 25 bp, Homo sapiens
ggattccatggagcattttcatttc

SEQ ID NO: 7160 - DNA, 25 bp, Homo sapiens
ggcagcccctttgttggctgatgac

SEQ ID NO: 7161 - DNA, 25 bp, Homo sapiens
ggggttcaggtgactcataaccatg

SEQ ID NO: 7162 - DNA, 25 bp, Homo sapiens
ggtctagttaagttccacatgtagc

SEQ ID NO: 7163 - DNA, 25 bp, Homo sapiens
ggttcctagatgtgagggcagcccc

SEQ ID NO: 7164 - DNA, 25 bp, Homo sapiens
tctacattgtctatctgctttttcg

SEQ ID NO: 7165 - DNA, 25 bp, Homo sapiens
tgctttttcggagattttccttctt

SEQ ID NO: 7166 - DNA, 25 bp, Homo sapiens
atcaccgacgtgatgatctgtgccg

SEQ ID NO: 7167 - DNA, 25 bp, Homo sapiens
atgccgaatgcaagaagtcctgggg

SEQ ID NO: 7168 - DNA, 25 bp, Homo sapiens
caacaagacccctgacaagctgcag

SEQ ID NO: 7169 - DNA, 25 bp, Homo sapiens
caccgacgtgatgatctgtgccggg

SEQ ID NO: 7170 - DNA, 25 bp, Homo sapiens
ccgacgtgatgatctgtgccggggc

SEQ ID NO: 7171 - DNA, 25 bp, Homo sapiens
cctcctgtccaatgccgaatgcaag

SEQ ID NO: 7172 - DNA, 25 bp, Homo sapiens
gaccaagtacaacgccaacaagacc

SEQ ID NO: 7173 - DNA, 25 bp, Homo sapiens
gccgaatgcaagaagtcctggggca

SEQ ID NO: 7174 - DNA, 25 bp, Homo sapiens
ggaggatcaccgacgtgatgatctg

SEQ ID NO: 7175 - DNA, 25 bp, Homo sapiens
gggcaggaggatcaccgacgtgatg

SEQ ID NO: 7176 - DNA, 25 bp, Homo sapiens
tcctgtccaatgccgaatgcaagaa

SEQ ID NO: 7177 - DNA, 25 bp, Homo sapiens
agcaggttctgctgagggtggggct

SEQ ID NO: 7178 - DNA, 25 bp, Homo sapiens
agctgtagaggcttcctgaactggg

SEQ ID NO: 7179 - DNA, 25 bp, Homo sapiens
ccatctcccttcacaggatgacacc

SEQ ID NO: 7180 - DNA, 25 bp, Homo sapiens
cctgctaggctctggagctgtagag

SEQ ID NO: 7181 - DNA, 25 bp, Homo sapiens
gaccccagtggccacactgggatag

SEQ ID NO: 7182 - DNA, 25 bp, Homo sapiens
gaggtgacacagcctgtaggaacat

SEQ ID NO: 7183 - DNA, 25 bp, Homo sapiens
gcacagatgcatacactggggccca

SEQ ID NO: 7184 - DNA, 25 bp, Homo sapiens
gctggggccagcaggttctgctgag

SEQ ID NO: 7185 - DNA, 25 bp, Homo sapiens
tacacagctgggatcagcctgcagc

SEQ ID NO: 7186 - DNA, 25 bp, Homo sapiens
tcacattccactgctgggagaagaa

SEQ ID NO: 7187 - DNA, 25 bp, Homo sapiens
tcccataccccatagctggggccag

SEQ ID NO: 7188 - DNA, 25 bp, Homo sapiens
aagtaattttgctccttgataaagt

SEQ ID NO: 7189 - DNA, 25 bp, Homo sapiens
aattatctataatctcagaacccag

SEQ ID NO: 7190 - DNA, 25 bp, Homo sapiens
agccactattaacatttcctacgta

SEQ ID NO: 7191 - DNA, 25 bp, Homo sapiens
atgtatcacaacttaaccgttcccg

SEQ ID NO: 7192 - DNA, 25 bp, Homo sapiens
ctcagaacccagaaatagccactat

SEQ ID NO: 7193 - DNA, 25 bp, Homo sapiens
gataagcttttggtaatattcattt

SEQ ID NO: 7194 - DNA, 25 bp, Homo sapiens
gttagactagtttcttattaatgtt

SEQ ID NO: 7195 - DNA, 25 bp, Homo sapiens
taattttgttgctacatttacttta

SEQ ID NO: 7196 - DNA, 25 bp, Homo sapiens
tagttgttgagtattccaccacagg

SEQ ID NO: 7197 - DNA, 25 bp, Homo sapiens
tccaccacaggaatgtatcacaact

SEQ ID NO: 7198 - DNA, 25 bp, Homo sapiens
ttatgaaactttcctttgtcattat

SEQ ID NO: 7199 - DNA, 25 bp, Homo sapiens
aaaagaccatcaattccgacatatc

SEQ ID NO: 7200 - DNA, 25 bp, Homo sapiens
aagagttcatagacagtgatgccgc

SEQ ID NO: 7201 - DNA, 25 bp, Homo sapiens
actttacccaaggcgtttggctcag

SEQ ID NO: 7202 - DNA, 25 bp, Homo sapiens
ctcctcctgcactgctatgcagatt

SEQ ID NO: 7203 - DNA, 25 bp, Homo sapiens
gactatggccagaactcatctgttg

SEQ ID NO: 7204 - DNA, 25 bp, Homo sapiens
gcatacagtgtacgacagcatttgg

SEQ ID NO: 7205 - DNA, 25 bp, Homo sapiens
ggctcagagggctacagactatggc

SEQ ID NO: 7206 - DNA, 25 bp, Homo sapiens
gtgatgccgctgcagaggctatggg

SEQ ID NO: 7207 - DNA, 25 bp, Homo sapiens
gtttcctcaaccagtcacatagaac

SEQ ID NO: 7208 - DNA, 25 bp, Homo sapiens
tccgacatatctatacctgaataca

SEQ ID NO: 7209 - DNA, 25 bp, Homo sapiens
tgccacgcacgactgaacacagaca

SEQ ID NO: 7210 - DNA, 25 bp, Homo sapiens
agtcccctgatggcagccagaagac

SEQ ID NO: 7211 - DNA, 25 bp, Homo sapiens
gaagacgtctctagtgttgcgaaca

SEQ ID NO: 7212 - DNA, 25 bp, Homo sapiens
gccagaagacgtctctagtgttgcg

SEQ ID NO: 7213 - DNA, 25 bp, Homo sapiens
gcctgtgtcttcgggctgaatttga

SEQ ID NO: 7214 - DNA, 25 bp, Homo sapiens
ggcagccagaagacgtctctagtgt

SEQ ID NO: 7215 - DNA, 25 bp, Homo sapiens
gtctctagtgttgcgaacactctgt

SEQ ID NO: 7216 - DNA, 25 bp, Homo sapiens
gtgtcttcgggctgaatttgatctg

SEQ ID NO: 7217 - DNA, 25 bp, Homo sapiens
tgaatttgatctggccatcccaggg

SEQ ID NO: 7218 - DNA, 25 bp, Homo sapiens
tgatggcagccagaagacgtctcta

SEQ ID NO: 7219 - DNA, 25 bp, Homo sapiens
tgtgcacttgtatgttttgtaaact

SEQ ID NO: 7220 - DNA, 25 bp, Homo sapiens
ttgtaaacttggcatctgtaaaaat

SEQ ID NO: 7221 - DNA, 25 bp, Homo sapiens
cagtgcctacgtctaagctgggcca

SEQ ID NO: 7222 - DNA, 25 bp, Homo sapiens
ccctgagtgagcacctggttaccac

SEQ ID NO: 7223 - DNA, 25 bp, Homo sapiens
cctccggtgagcagggtcagtggaa

SEQ ID NO: 7224 - DNA, 25 bp, Homo sapiens
ctccactggcctcgtggtgtatgac

SEQ ID NO: 7225 - DNA, 25 bp, Homo sapiens
gatagctccagagagcatccccagt

SEQ ID NO: 7226 - DNA, 25 bp, Homo sapiens
gcacctgctgctacatcatgaagat

SEQ ID NO: 7227 - DNA, 25 bp, Homo sapiens
ggccttcttgggcatggccgtgaac

SEQ ID NO: 7228 - DNA, 25 bp, Homo sapiens
gggcaagaagctgcttctgcccaca

SEQ ID NO: 7229 - DNA, 25 bp, Homo sapiens
gggtcttttgcagcttttgcagacg

SEQ ID NO: 7230 - DNA, 25 bp, Homo sapiens
gtgtatgactaccagcagctgctga

SEQ ID NO: 7231 - DNA, 25 bp, Homo sapiens
tgaacaccctgtgtggcgaggtgcc

SEQ ID NO: 7232 - DNA, 25 bp, Homo sapiens
agtatccagacctgatcgctgagct

SEQ ID NO: 7233 - DNA, 25 bp, Homo sapiens
cctgggcttacctggggggcaggat

SEQ ID NO: 7234 - DNA, 25 bp, Homo sapiens
cggaggcggaggtcaagggcgcact

SEQ ID NO: 7235 - DNA, 25 bp, Homo sapiens
ctgggagaccagagtcccctttagg

SEQ ID NO: 7236 - DNA, 25 bp, Homo sapiens
gagccagagccgtgggttttggtgg

SEQ ID NO: 7237 - DNA, 25 bp, Homo sapiens
gccgaccatctggatcacatcaagg

SEQ ID NO: 7238 - DNA, 25 bp, Homo sapiens
gctgcccacatgcaaggaccagcat

SEQ ID NO: 7239 - DNA, 25 bp, Homo sapiens
ggaggacgtctccaagtatccagac

SEQ ID NO: 7240 - DNA, 25 bp, Homo sapiens
ggcaggatgcctggggacagttcag

SEQ ID NO: 7241 - DNA, 25 bp, Homo sapiens
tgagggtcttcgaggctgtggaaca

SEQ ID NO: 7242 - DNA, 25 bp, Homo sapiens
ttgatggtgttccaagggtccctga

SEQ ID NO: 7243 - DNA, 25 bp, Homo sapiens
aaccggggattctgtacatgcattg

SEQ ID NO: 7244 - DNA, 25 bp, Homo sapiens
acacaccctttggaagtggacccag

SEQ ID NO: 7245 - DNA, 25 bp, Homo sapiens
atcagagtccttcagaacttctcct

SEQ ID NO: 7246 - DNA, 25 bp, Homo sapiens
cagatccccctgaaattaagcttag

SEQ ID NO: 7247 - DNA, 25 bp, Homo sapiens
gatgggcttcatccaatggactgca

SEQ ID NO: 7248 - DNA, 25 bp, Homo sapiens
gcttaggaggacttcttcaaccaga

SEQ ID NO: 7249 - DNA, 25 bp, Homo sapiens
ggacagagcctgagaagttcctccc

SEQ ID NO: 7250 - DNA, 25 bp, Homo sapiens
tagatccttacatatacacaccctt

SEQ ID NO: 7251 - DNA, 25 bp, Homo sapiens
tcttcaccgtgacccaaagtactgg

SEQ ID NO: 7252 - DNA, 25 bp, Homo sapiens
tgattccaagctatgctcttcaccg

SEQ ID NO: 7253 - DNA, 25 bp, Homo sapiens
tttcctaaggacttctgctttgctc

SEQ ID NO: 7254 - DNA, 25 bp, Homo sapiens
actttgctatgtgctcctaatgtat

SEQ ID NO: 7255 - DNA, 25 bp, Homo sapiens
cagccttgctttggataggacctcc

SEQ ID NO: 7256 - DNA, 25 bp, Homo sapiens
caggctgcacagcatttgctttcct

SEQ ID NO: 7257 - DNA, 25 bp, Homo sapiens
gacaacactcatcacacttcattgt

SEQ ID NO: 7258 - DNA, 25 bp, Homo sapiens
gatgcatggctggcacattgttggc

SEQ ID NO: 7259 - DNA, 25 bp, Homo sapiens
gccccagtgcctagatgcatggctg

SEQ ID NO: 7260 - DNA, 25 bp, Homo sapiens
ggcacatgttgttctcattgaccgt

SEQ ID NO: 7261 - DNA, 25 bp, Homo sapiens
ggcagcttttttatcagccttgctt

SEQ ID NO: 7262 - DNA, 25 bp, Homo sapiens
gtacttctggcgagccaggctgcac

SEQ ID NO: 7263 - DNA, 25 bp, Homo sapiens
taatgtatctagtgtgtcctgtgac

SEQ ID NO: 7264 - DNA, 25 bp, Homo sapiens
taggacctccaaggactaagcctcc

SEQ ID NO: 7265 - DNA, 25 bp, Homo sapiens
aaatgagacttgctctctggccttt

SEQ ID NO: 7266 - DNA, 25 bp, Homo sapiens
acgatccagcccagagacactgatt

SEQ ID NO: 7267 - DNA, 25 bp, Homo sapiens
atgttcccagaactcggcttgaaga

SEQ ID NO: 7268 - DNA, 25 bp, Homo sapiens
cgccagccaccatgctaggtaacaa

SEQ ID NO: 7269 - DNA, 25 bp, Homo sapiens
gacatggccagatactactcggcgc

SEQ ID NO: 7270 - DNA, 25 bp, Homo sapiens
ggacgcaccagcggaggacatggcc

SEQ ID NO: 7271 - DNA, 25 bp, Homo sapiens
taacaagcgactggggctgtccgga

SEQ ID NO: 7272 - DNA, 25 bp, Homo sapiens
tcaacctcatcaccaggcagagata

SEQ ID NO: 7273 - DNA, 25 bp, Homo sapiens
tcagcccatatttcatcgtgtaaaa

SEQ ID NO: 7274 - DNA, 25 bp, Homo sapiens
tcggcttgaagaccctgcaatgtgg

SEQ ID NO: 7275 - DNA, 25 bp, Homo sapiens
tgtaaaacgagaatccacccatcct

SEQ ID NO: 7276 - DNA, 25 bp, Homo sapiens
aagtctttcactaaggttctcttgc

SEQ ID NO: 7277 - DNA, 25 bp, Homo sapiens
agatgaggtacatacactgccgctt

SEQ ID NO: 7278 - DNA, 25 bp, Homo sapiens
atacagggtctatcttgcttcctac

SEQ ID NO: 7279 - DNA, 25 bp, Homo sapiens
cagtgcctcaagtacatccttatta

SEQ ID NO: 7280 - DNA, 25 bp, Homo sapiens
gagtagactaggattccttctctta

SEQ ID NO: 7281 - DNA, 25 bp, Homo sapiens
gccttgattgctcctagttatatac

SEQ ID NO: 7282 - DNA, 25 bp, Homo sapiens
ggaacagggaactgtcctacactgc

SEQ ID NO: 7283 - DNA, 25 bp, Homo sapiens
gtcctacactgctattgttgctaca

SEQ ID NO: 7284 - DNA, 25 bp, Homo sapiens
gtgagtgctgacttgtctttgcaat

SEQ ID NO: 7285 - DNA, 25 bp, Homo sapiens
gttgctacatgtatcgagccttgat

SEQ ID NO: 7286 - DNA, 25 bp, Homo sapiens
tcctacctacatctgcttgagcagt

SEQ ID NO: 7287 - DNA, 25 bp, Homo sapiens
acctctccctcacgttactgggagc

SEQ ID NO: 7288 - DNA, 25 bp, Homo sapiens
ccctgtgccaggagcaatgggactg

SEQ ID NO: 7289 - DNA, 25 bp, Homo sapiens
gaaacagtgacactgcgccagtcgt

SEQ ID NO: 7290 - DNA, 25 bp, Homo sapiens
gaaggctctgggttacagaggccca

SEQ ID NO: 7291 - DNA, 25 bp, Homo sapiens
gatcctcaacgttggggacattgga

SEQ ID NO: 7292 - DNA, 25 bp, Homo sapiens
gcttcttctcagacgctggaggtga

SEQ ID NO: 7293 - DNA, 25 bp, Homo sapiens
ggagagggagtcagtcttcacttgc

SEQ ID NO: 7294 - DNA, 25 bp, Homo sapiens
ggggcacactacagagcagctcccc

SEQ ID NO: 7295 - DNA, 25 bp, Homo sapiens
gtcacttaggagagaccatccctat

SEQ ID NO: 7296 - DNA, 25 bp, Homo sapiens
gtcgtttgtgcctgtgcgaccaggc

SEQ ID NO: 7297 - DNA, 25 bp, Homo sapiens
gtgcacggtgtcatccaggtggatg

SEQ ID NO: 7298 - DNA, 25 bp, Homo sapiens
aaaccttgcaaatatgtaacctgtg

SEQ ID NO: 7299 - DNA, 25 bp, Homo sapiens
aatgcgccttggtatactaagtatt

SEQ ID NO: 7300 - DNA, 25 bp, Homo sapiens
acgattgccttcagtttgtgttgtg

SEQ ID NO: 7301 - DNA, 25 bp, Homo sapiens
gcaacgctgcccattcaattgaatc

SEQ ID NO: 7302 - DNA, 25 bp, Homo sapiens
gtaacctgtgttgcgcaaatgccgc

SEQ ID NO: 7303 - DNA, 25 bp, Homo sapiens
gtggacgcagaccttgagaacaacc

SEQ ID NO: 7304 - DNA, 25 bp, Homo sapiens
gtggtcatatgcccgtgtttgtcac

SEQ ID NO: 7305 - DNA, 25 bp, Homo sapiens
gttgtttcagttggcaacgctgccc

SEQ ID NO: 7306 - DNA, 25 bp, Homo sapiens
tgggttctagaaaatgcgccttggt

SEQ ID NO: 7307 - DNA, 25 bp, Homo sapiens
tggtcactaacaggtcacttttatt

SEQ ID NO: 7308 - DNA, 25 bp, Homo sapiens
tgtgatactgtggtcatatgcccgt

SEQ ID NO: 7309 - DNA, 25 bp, Homo sapiens
agctttagcgtgtcacgggcatcat

SEQ ID NO: 7310 - DNA, 25 bp, Homo sapiens
aggttaccgatttcaaagtccagat

SEQ ID NO: 7311 - DNA, 25 bp, Homo sapiens
atcattctctaatatccacttgtcc

SEQ ID NO: 7312 - DNA, 25 bp, Homo sapiens
caaatacggatcctgcactgactct

SEQ ID NO: 7313 - DNA, 25 bp, Homo sapiens
gagaatgcaccatactcatgcatgc

SEQ ID NO: 7314 - DNA, 25 bp, Homo sapiens
gatatgtttagctacgtttactcac

SEQ ID NO: 7315 - DNA, 25 bp, Homo sapiens
ggcttgtcttctgaacgtttggttc

SEQ ID NO: 7316 - DNA, 25 bp, Homo sapiens
gtcattttggtctaaggttgccatt

SEQ ID NO: 7317 - DNA, 25 bp, Homo sapiens
gtttactcacagccagcgaactgac

SEQ ID NO: 7318 - DNA, 25 bp, Homo sapiens
tatttgtgggtgtgctatagcttta

SEQ ID NO: 7319 - DNA, 25 bp, Homo sapiens
ttgagttattcccacgttttgaaat

SEQ ID NO: 7320 - DNA, 25 bp, Homo sapiens
aaatccttgctaaatgtactctgtt

SEQ ID NO: 7321 - DNA, 25 bp, Homo sapiens
aatggatgccagctaattttccaca

SEQ ID NO: 7322 - DNA, 25 bp, Homo sapiens
atccctgtgttgtcaatgttctcag

SEQ ID NO: 7323 - DNA, 25 bp, Homo sapiens
atgatacttgttcgtcttttctgtc

SEQ ID NO: 7324 - DNA, 25 bp, Homo sapiens
cctcaggcatccaacgcactggagg

SEQ ID NO: 7325 - DNA, 25 bp, Homo sapiens
cgcactggaggagctttgctttatg

SEQ ID NO: 7326 - DNA, 25 bp, Homo sapiens
ggattacagcctgaacaacagctac

SEQ ID NO: 7327 - DNA, 25 bp, Homo sapiens
gggaatgctaccaaagcctcaggaa

SEQ ID NO: 7328 - DNA, 25 bp, Homo sapiens
gggcaagtcaaatgttgtgtcgtca

SEQ ID NO: 7329 - DNA, 25 bp, Homo sapiens
ggtgctccaatattacctcaaggat

SEQ ID NO: 7330 - DNA, 25 bp, Homo sapiens
gtactctgttgaaaatccctgtgtt

SEQ ID NO: 7331 - DNA, 25 bp, Homo sapiens
aagacgatcccactgggcggagact

SEQ ID NO: 7332 - DNA, 25 bp, Homo sapiens
aagtattcgctgctgtttacattag

SEQ ID NO: 7333 - DNA, 25 bp, Homo sapiens
aattctgctagtctgtaagctcctt

SEQ ID NO: 7334 - DNA, 25 bp, Homo sapiens
acacggtgtcttacaaattctgcta

SEQ ID NO: 7335 - DNA, 25 bp, Homo sapiens
actgcatacatagctcctagcacag

SEQ ID NO: 7336 - DNA, 25 bp, Homo sapiens
agaaattgctgctatcatccatcct

SEQ ID NO: 7337 - DNA, 25 bp, Homo sapiens
cgtgtaccccgtgtttgtgaatgag

SEQ ID NO: 7338 - DNA, 25 bp, Homo sapiens
cttccagcttacatcttacacggtg

SEQ ID NO: 7339 - DNA, 25 bp, Homo sapiens
gatacttgggtagctcaacattctt

SEQ ID NO: 7340 - DNA, 25 bp, Homo sapiens
ggttgtgccttattcaactgcatac

SEQ ID NO: 7341 - DNA, 25 bp, Homo sapiens
tgggcggagactgtaccgtgtaccc

SEQ ID NO: 7342 - DNA, 25 bp, Homo sapiens
aaatttcaattccagtaacttctat

SEQ ID NO: 7343 - DNA, 25 bp, Homo sapiens
acactgacacaggggttttactttg

SEQ ID NO: 7344 - DNA, 25 bp, Homo sapiens
agtaacttctattgtaaccattatt

SEQ ID NO: 7345 - DNA, 25 bp, Homo sapiens
atcactattttgaagcacagcttta

SEQ ID NO: 7346 - DNA, 25 bp, Homo sapiens
attgcagtcttgattctgccactta

SEQ ID NO: 7347 - DNA, 25 bp, Homo sapiens
gaatcttttccccatgcaggagtgt

SEQ ID NO: 7348 - DNA, 25 bp, Homo sapiens
gataacgcctgaactttaatgacaa

SEQ ID NO: 7349 - DNA, 25 bp, Homo sapiens
gatccaaccataaaggtgctctgtg

SEQ ID NO: 7350 - DNA, 25 bp, Homo sapiens
gattctgccacttacaggatagata

SEQ ID NO: 7351 - DNA, 25 bp, Homo sapiens
gtgctctgtgcttcacagtgaatct

SEQ ID NO: 7352 - DNA, 25 bp, Homo sapiens
tgtgctcccctacaaacgttaagac

SEQ ID NO: 7353 - DNA, 25 bp, Homo sapiens
aaaaccacctggtctgcatgtatgc

SEQ ID NO: 7354 - DNA, 25 bp, Homo sapiens
aaaatgcagtggggtttgttttgca

SEQ ID NO: 7355 - DNA, 25 bp, Homo sapiens
aaagagcaaccagtatcacttccct

SEQ ID NO: 7356 - DNA, 25 bp, Homo sapiens
acctggtctgcatgtatgcccgaat

SEQ ID NO: 7357 - DNA, 25 bp, Homo sapiens
actagtgccgataaactttctcaaa

SEQ ID NO: 7358 - DNA, 25 bp, Homo sapiens
ataaaacctctaaccatctctttgt

SEQ ID NO: 7359 - DNA, 25 bp, Homo sapiens
atctctttgttctttgaacatgctg

SEQ ID NO: 7360 - DNA, 25 bp, Homo sapiens
ctgcatgtatgcccgaatttgtaat

SEQ ID NO: 7361 - DNA, 25 bp, Homo sapiens
gaacatgctgaaaaccacctggtct

SEQ ID NO: 7362 - DNA, 25 bp, Homo sapiens
ggaagcagctgtctaaaatgcagtg

SEQ ID NO: 7363 - DNA, 25 bp, Homo sapiens
tccccaagactttactagtgccgat

SEQ ID NO: 7364 - DNA, 25 bp, Homo sapiens
aatgggcagaatcttcactccaggc

SEQ ID NO: 7365 - DNA, 25 bp, Homo sapiens
actagtcacctaaggtcctgcgagt

SEQ ID NO: 7366 - DNA, 25 bp, Homo sapiens
attttattgacttcgtggccaggga

SEQ ID NO: 7367 - DNA, 25 bp, Homo sapiens
caaccactgggaatgatctcactga

SEQ ID NO: 7368 - DNA, 25 bp, Homo sapiens
cacctctgccagcaaccttgagagg

SEQ ID NO: 7369 - DNA, 25 bp, Homo sapiens
gctgaagtttatgtggtaccctggg

SEQ ID NO: 7370 - DNA, 25 bp, Homo sapiens
ggccaaagcctagattgcaacgctg

SEQ ID NO: 7371 - DNA, 25 bp, Homo sapiens
gggaggtctcttgaccaatgggcag

SEQ ID NO: 7372 - DNA, 25 bp, Homo sapiens
gtcgacccccaaaggcaggggcaga

SEQ ID NO: 7373 - DNA, 25 bp, Homo sapiens
tcctgcgagtacaagggtcgacccc

SEQ ID NO: 7374 - DNA, 25 bp, Homo sapiens
ttcacctttccgatcatcacgaata

SEQ ID NO: 7375 - DNA, 25 bp, Homo sapiens
aaaatagctctgtgattttactttt

SEQ ID NO: 7376 - DNA, 25 bp, Homo sapiens
aaattcaccactataggcttctttg

SEQ ID NO: 7377 - DNA, 25 bp, Homo sapiens
acccctgaagtgtgtgccatcggta

SEQ ID NO: 7378 - DNA, 25 bp, Homo sapiens
agaagcaggccttattcaactccct

SEQ ID NO: 7379 - DNA, 25 bp, Homo sapiens
agaagtcgccacactgaaatccaga

SEQ ID NO: 7380 - DNA, 25 bp, Homo sapiens
gcttgtactagatttcttacttaga

SEQ ID NO: 7381 - DNA, 25 bp, Homo sapiens
gtcaacccatggagaagcaggcctt

SEQ ID NO: 7382 - DNA, 25 bp, Homo sapiens
tgccacagcagggaccaggaaacag

SEQ ID NO: 7383 - DNA, 25 bp, Homo sapiens
tggagcgtgcaccctataagggaga

SEQ ID NO: 7384 - DNA, 25 bp, Homo sapiens
ttcaactccctaggatcctttagaa

SEQ ID NO: 7385 - DNA, 25 bp, Homo sapiens
ttcacagccaaacattgtcaaccca

SEQ ID NO: 7386 - DNA, 25 bp, Homo sapiens
aaataggggatggtccaggatctcc

SEQ ID NO: 7387 - DNA, 25 bp, Homo sapiens
accgttgcttgaaattactgtgtaa

SEQ ID NO: 7388 - DNA, 25 bp, Homo sapiens
agtactagatgcatcactgggtgtt

SEQ ID NO: 7389 - DNA, 25 bp, Homo sapiens
atagatgtacatacctccttgcaca

SEQ ID NO: 7390 - DNA, 25 bp, Homo sapiens
atgctggtatatggcttcaagttgt

SEQ ID NO: 7391 - DNA, 25 bp, Homo sapiens
atggaggggaattcattttcatcac

SEQ ID NO: 7392 - DNA, 25 bp, Homo sapiens
atgtctgataatgatttgctctttg

SEQ ID NO: 7393 - DNA, 25 bp, Homo sapiens
ggaatttattatttaccgttgcttg

SEQ ID NO: 7394 - DNA, 25 bp, Homo sapiens
ggtccaggatctccactgataagac

SEQ ID NO: 7395 - DNA, 25 bp, Homo sapiens
tcactgggtgttgatcttacaagat

SEQ ID NO: 7396 - DNA, 25 bp, Homo sapiens
tcatcactgggagtgtccttagtgt

SEQ ID NO: 7397 - DNA, 25 bp, Homo sapiens
aatccaactcatttatacttttatt

SEQ ID NO: 7398 - DNA, 25 bp, Homo sapiens
actttactccataagcgcttcagtg

SEQ ID NO: 7399 - DNA, 25 bp, Homo sapiens
atcccggctgctgcatttaggtgga

SEQ ID NO: 7400 - DNA, 25 bp, Homo sapiens
caacatgctgtgctccatagctggt

SEQ ID NO: 7401 - DNA, 25 bp, Homo sapiens
catgtcttactgatctaaccctaaa

SEQ ID NO: 7402 - DNA, 25 bp, Homo sapiens
ctcccaaatttagttcctcatcaca

SEQ ID NO: 7403 - DNA, 25 bp, Homo sapiens
gaggacccaatctataggagcagtg

SEQ ID NO: 7404 - DNA, 25 bp, Homo sapiens
tcagtggggttatcctagtggctct

SEQ ID NO: 7405 - DNA, 25 bp, Homo sapiens
tggtcgcttacatcactttactcca

SEQ ID NO: 7406 - DNA, 25 bp, Homo sapiens
ttaggtggagacttcttcccattcc

SEQ ID NO: 7407 - DNA, 25 bp, Homo sapiens
tttagggggttggtatctcgtgctc

SEQ ID NO: 7408 - DNA, 25 bp, Homo sapiens
aaggcatccatcagagcagacgccc

SEQ ID NO: 7409 - DNA, 25 bp, Homo sapiens
agagctggtggggctccagatcagg

SEQ ID NO: 7410 - DNA, 25 bp, Homo sapiens
cacctgagaggggactctcgttgcc

SEQ ID NO: 7411 - DNA, 25 bp, Homo sapiens
cagagctggtggggctccagatcag

SEQ ID NO: 7412 - DNA, 25 bp, Homo sapiens
catcccaaggcatccatcagagcag

SEQ ID NO: 7413 - DNA, 25 bp, Homo sapiens
cccagcctggaatgtaaatcagctg

SEQ ID NO: 7414 - DNA, 25 bp, Homo sapiens
ccggtgctctcagaaacctcagagc

SEQ ID NO: 7415 - DNA, 25 bp, Homo sapiens
cctgagaggggactctcgttgccac

SEQ ID NO: 7416 - DNA, 25 bp, Homo sapiens
gcctggaatgtaaatcagctgtgtg

SEQ ID NO: 7417 - DNA, 25 bp, Homo sapiens
gtggctggaaggaaatagacccttt

SEQ ID NO: 7418 - DNA, 25 bp, Homo sapiens
tcccaaggcatccatcagagcagac

SEQ ID NO: 7419 - DNA, 25 bp, Homo sapiens
aaaaggttgtgctatccagattttt

SEQ ID NO: 7420 - DNA, 25 bp, Homo sapiens
aatgcactctaacttatgtgaactg

SEQ ID NO: 7421 - DNA, 25 bp, Homo sapiens
atccagattttttatatgtctgcat

SEQ ID NO: 7422 - DNA, 25 bp, Homo sapiens
atgttgtaccatttgcactgtgagc

SEQ ID NO: 7423 - DNA, 25 bp, Homo sapiens
ctcgctccttctggtatatgcatgt

SEQ ID NO: 7424 - DNA, 25 bp, Homo sapiens
gcatgataattgagttttcctttgt

SEQ ID NO: 7425 - DNA, 25 bp, Homo sapiens
ggaaaacctatggggaatgatattt

SEQ ID NO: 7426 - DNA, 25 bp, Homo sapiens
ggtatatgcatgtcactgcatgata

SEQ ID NO: 7427 - DNA, 25 bp, Homo sapiens
gttgccaaaaggttgtgctatccag

SEQ ID NO: 7428 - DNA, 25 bp, Homo sapiens
tatttcttggatttatagtacctta

SEQ ID NO: 7429 - DNA, 25 bp, Homo sapiens
ttcatttgctcctttgtcatattgt

SEQ ID NO: 7430 - DNA, 25 bp, Homo sapiens
aagtcactggaggctcaggctgaga

SEQ ID NO: 7431 - DNA, 25 bp, Homo sapiens
accacgctctcaacgatatgacttc

SEQ ID NO: 7432 - DNA, 25 bp, Homo sapiens
ccttagagccaggcacacactgtgc

SEQ ID NO: 7433 - DNA, 25 bp, Homo sapiens
ctctctgagctctgcatttgtctat

SEQ ID NO: 7434 - DNA, 25 bp, Homo sapiens
ctctcttagcatcctgccttagagc

SEQ ID NO: 7435 - DNA, 25 bp, Homo sapiens
gaagacgagctgtacgctcagaaac

SEQ ID NO: 7436 - DNA, 25 bp, Homo sapiens
gcacacactgtgctttctattgtac

SEQ ID NO: 7437 - DNA, 25 bp, Homo sapiens
ggcaaatgtgccgagcttgaagaag

SEQ ID NO: 7438 - DNA, 25 bp, Homo sapiens
ggctcaggctgagaagtactcgcag

SEQ ID NO: 7439 - DNA, 25 bp, Homo sapiens
tgcatttgtctattctccagctgac

SEQ ID NO: 7440 - DNA, 25 bp, Homo sapiens
ttgtacagaagctcttcgtttcagt

SEQ ID NO: 7441 - DNA, 25 bp, Homo sapiens
aaacatgactaccctcagtgtatta

SEQ ID NO: 7442 - DNA, 25 bp, Homo sapiens
aaatatccaatacccagagtcctgc

SEQ ID NO: 7443 - DNA, 25 bp, Homo sapiens
actctagcctggtttcctagattga

SEQ ID NO: 7444 - DNA, 25 bp, Homo sapiens
actctcctacaaaagctcaagcctg

SEQ ID NO: 7445 - DNA, 25 bp, Homo sapiens
cacctagtgcctctgggccataagg

SEQ ID NO: 7446 - DNA, 25 bp, Homo sapiens
cctgctctcagagttcttctgtttc

SEQ ID NO: 7447 - DNA, 25 bp, Homo sapiens
ctctccatcctagtcaacactggat

SEQ ID NO: 7448 - DNA, 25 bp, Homo sapiens
gagaccatcctgtttaagtttattc

SEQ ID NO: 7449 - DNA, 25 bp, Homo sapiens
gagatggatatttcagccctctcca

SEQ ID NO: 7450 - DNA, 25 bp, Homo sapiens
gtcaacactggatccacctagtgcc

SEQ ID NO: 7451 - DNA, 25 bp, Homo sapiens
taatttaatatctactctcctacaa

SEQ ID NO: 7452 - DNA, 25 bp, Homo sapiens
accctttctcctgttggactacagt

SEQ ID NO: 7453 - DNA, 25 bp, Homo sapiens
cagtcctcccatgatagccagggag

SEQ ID NO: 7454 - DNA, 25 bp, Homo sapiens
cagttcagaggcagcctgcagtcct

SEQ ID NO: 7455 - DNA, 25 bp, Homo sapiens
ccacccaaccgagcagaggctttgg

SEQ ID NO: 7456 - DNA, 25 bp, Homo sapiens
gaccctaggctccagggggaactgc

SEQ ID NO: 7457 - DNA, 25 bp, Homo sapiens
gaccttcccgctgcggacagggaag

SEQ ID NO: 7458 - DNA, 25 bp, Homo sapiens
gagagccgcacaacatacaattata

SEQ ID NO: 7459 - DNA, 25 bp, Homo sapiens
gagcagaggctttgggtacagaccc

SEQ ID NO: 7460 - DNA, 25 bp, Homo sapiens
ggactacagttcagaggcagcctgc

SEQ ID NO: 7461 - DNA, 25 bp, Homo sapiens
tcctccttttttaatccagcagcat

SEQ ID NO: 7462 - DNA, 25 bp, Homo sapiens
tgatagccagggagagccgcacaac

SEQ ID NO: 7463 - DNA, 25 bp, Homo sapiens
aagcccatcagcctggcagatcatt

SEQ ID NO: 7464 - DNA, 25 bp, Homo sapiens
acacccctgctacaacagcagcgat

SEQ ID NO: 7465 - DNA, 25 bp, Homo sapiens
accagtccccgagagaattttcctg

SEQ ID NO: 7466 - DNA, 25 bp, Homo sapiens
aggatgcttacccggggcagatcac

SEQ ID NO: 7467 - DNA, 25 bp, Homo sapiens
caggcatccctggggtccaaagtga

SEQ ID NO: 7468 - DNA, 25 bp, Homo sapiens
ctggcgtctataccaacatctgccg

SEQ ID NO: 7469 - DNA, 25 bp, Homo sapiens
gaaatacctgtggttcagtccatcc

SEQ ID NO: 7470 - DNA, 25 bp, Homo sapiens
gacacgtgccagggcgattctggag

SEQ ID NO: 7471 - DNA, 25 bp, Homo sapiens
tacacagtacgcctgggagaccaca

SEQ ID NO: 7472 - DNA, 25 bp, Homo sapiens
tgatctgatgcttcttcaactgcgt

SEQ ID NO: 7473 - DNA, 25 bp, Homo sapiens
ttttcctgacactctcaactgtgca

SEQ ID NO: 7474 - DNA, 25 bp, Homo sapiens
atgccaccggcgaggtggcctgacc

SEQ ID NO: 7475 - DNA, 25 bp, Homo sapiens
ccctggaggactgagatcccacctc

SEQ ID NO: 7476 - DNA, 25 bp, Homo sapiens
gaaccccttcaatacctggataggt

SEQ ID NO: 7477 - DNA, 25 bp, Homo sapiens
ggagaacgcacacctggtggtcatc

SEQ ID NO: 7478 - DNA, 25 bp, Homo sapiens
ggccgctggaacgatgacttctgcc

SEQ ID NO: 7479 - DNA, 25 bp, Homo sapiens
ggtagtttaagagtccctgaccctg

SEQ ID NO: 7480 - DNA, 25 bp, Homo sapiens
taattggcacgggcacgagctgggt

SEQ ID NO: 7481 - DNA, 25 bp, Homo sapiens
tcattgtacaacacacgaacccctt

SEQ ID NO: 7482 - DNA, 25 bp, Homo sapiens
tgcaggtgtaccgctgggtgtgtga

SEQ ID NO: 7483 - DNA, 25 bp, Homo sapiens
tgttgaagtccagccggatggccgc

SEQ ID NO: 7484 - DNA, 25 bp, Homo sapiens
ttattataatcgtcagcctcttcaa

SEQ ID NO: 7485 - DNA, 25 bp, Homo sapiens
aaattgtgttcagtgctgtacattt

SEQ ID NO: 7486 - DNA, 25 bp, Homo sapiens
agaaatctcttaccaacctacatat

SEQ ID NO: 7487 - DNA, 25 bp, Homo sapiens
atgagctaccatatgtgctgtctat

SEQ ID NO: 7488 - DNA, 25 bp, Homo sapiens
atgtgcactgaatttgttttctttt

SEQ ID NO: 7489 - DNA, 25 bp, Homo sapiens
atttatttgcctactttgtacttga

SEQ ID NO: 7490 - DNA, 25 bp, Homo sapiens
ctataatttgctatgacttcaggtt

SEQ ID NO: 7491 - DNA, 25 bp, Homo sapiens
gagcaggatgttttgtgaagtatgt

SEQ ID NO: 7492 - DNA, 25 bp, Homo sapiens
gatgcatacaaatgagctcacttat

SEQ ID NO: 7493 - DNA, 25 bp, Homo sapiens
gcctactttgtacttgatgtgtttt

SEQ ID NO: 7494 - DNA, 25 bp, Homo sapiens
gtttgtttgtatactgtttctccaa

SEQ ID NO: 7495 - DNA, 25 bp, Homo sapiens
tatacagtacttcatagatgcatac

SEQ ID NO: 7496 - DNA, 25 bp, Homo sapiens
aagatggttctagcatggcatattt

SEQ ID NO: 7497 - DNA, 25 bp, Homo sapiens
aatcgggtatatgaggtgccagttg

SEQ ID NO: 7498 - DNA, 25 bp, Homo sapiens
atagtggcgccactgttttgaatct

SEQ ID NO: 7499 - DNA, 25 bp, Homo sapiens
cagtacttcaaagtttaatcccagt

SEQ ID NO: 7500 - DNA, 25 bp, Homo sapiens
gaaggatcttcatctgactatgaca

SEQ ID NO: 7501 - DNA, 25 bp, Homo sapiens
gacagatttccatcctagtcactac

SEQ ID NO: 7502 - DNA, 25 bp, Homo sapiens
gcatggcatatttttcacatatcta

SEQ ID NO: 7503 - DNA, 25 bp, Homo sapiens
ggtttagcagtatagtggcgccact

SEQ ID NO: 7504 - DNA, 25 bp, Homo sapiens
gtagcactgacagatttccatccta

SEQ ID NO: 7505 - DNA, 25 bp, Homo sapiens
taacaatccatgatgctgttttgca

SEQ ID NO: 7506 - DNA, 25 bp, Homo sapiens
tcctagtcactaccttcatgcatag

SEQ ID NO: 7507 - DNA, 25 bp, Homo sapiens
aacactttgagtggccaggcctgtg

SEQ ID NO: 7508 - DNA, 25 bp, Homo sapiens
aggggaaacgagtggtctgctctgc

SEQ ID NO: 7509 - DNA, 25 bp, Homo sapiens
gaaggctctttcctagtgatggaga

SEQ ID NO: 7510 - DNA, 25 bp, Homo sapiens
gagggacccttgaagtctggactct

SEQ ID NO: 7511 - DNA, 25 bp, Homo sapiens
gctgatttcctgggtgcatgctagg

SEQ ID NO: 7512 - DNA, 25 bp, Homo sapiens
ggcctgtgtcatgtgctaattccta

SEQ ID NO: 7513 - DNA, 25 bp, Homo sapiens
tcatcaggctccagttattctccat

SEQ ID NO: 7514 - DNA, 25 bp, Homo sapiens
tctgctctgctcgggcaaaacaaga

SEQ ID NO: 7515 - DNA, 25 bp, Homo sapiens
tgacccgtttggggtctcatctcta

SEQ ID NO: 7516 - DNA, 25 bp, Homo sapiens
ttctatcctgctaacccagtaaccc

SEQ ID NO: 7517 - DNA, 25 bp, Homo sapiens
tttctgtctgtaagcctgattttca

SEQ ID NO: 7518 - DNA, 25 bp, Homo sapiens
aagccactagaaccaaggcccagct

SEQ ID NO: 7519 - DNA, 25 bp, Homo sapiens
cccatcaactctggggacctctttg

SEQ ID NO: 7520 - DNA, 25 bp, Homo sapiens
ctgctgccggtggtggactatgaac

SEQ ID NO: 7521 - DNA, 25 bp, Homo sapiens
gacaagctgcaggaggccctgctgc

SEQ ID NO: 7522 - DNA, 25 bp, Homo sapiens
gcaatggtgactctggaggacccct

SEQ ID NO: 7523 - DNA, 25 bp, Homo sapiens
gcccagctggcagtgctgatcgatc

SEQ ID NO: 7524 - DNA, 25 bp, Homo sapiens
gtggcctgtggcaatgacatcgccc

SEQ ID NO: 7525 - DNA, 25 bp, Homo sapiens
tcctccgtgaagaagaccatggtgt

SEQ ID NO: 7526 - DNA, 25 bp, Homo sapiens
tctccgccttcattgactggattga

SEQ ID NO: 7527 - DNA, 25 bp, Homo sapiens
tggcgtgaccagctttgtttctgcc

SEQ ID NO: 7528 - DNA, 25 bp, Homo sapiens
tggtggactatgaacactgctccag

SEQ ID NO: 7529 - DNA, 25 bp, Homo sapiens
acgcagatccatgtcccaatatagt

SEQ ID NO: 7530 - DNA, 25 bp, Homo sapiens
ctgtggtcaagtgccacgcagatcc

SEQ ID NO: 7531 - DNA, 25 bp, Homo sapiens
cttcatctccaagccctcagagaag

SEQ ID NO: 7532 - DNA, 25 bp, Homo sapiens
gaaaaccatcttgtgaggggctgcc

SEQ ID NO: 7533 - DNA, 25 bp, Homo sapiens
gagcaagagatgccacgagtgcctg

SEQ ID NO: 7534 - DNA, 25 bp, Homo sapiens
gctcaagccatgtgcacaggtcatc

SEQ ID NO: 7535 - DNA, 25 bp, Homo sapiens
ggattcagacgctctgggagccagt

SEQ ID NO: 7536 - DNA, 25 bp, Homo sapiens
ggctctagcatctctcataggtgca

SEQ ID NO: 7537 - DNA, 25 bp, Homo sapiens
tgcaaacaagacgacctcctttcgg

SEQ ID NO: 7538 - DNA, 25 bp, Homo sapiens
tgctcaacctcgtggagctcatcta

SEQ ID NO: 7539 - DNA, 25 bp, Homo sapiens
tggactggtctggcaggttgggcct

SEQ ID NO: 7540 - DNA, 25 bp, Homo sapiens
aaacacatgccagttgggaaggtct

SEQ ID NO: 7541 - DNA, 25 bp, Homo sapiens
aaactcacacttaaaacacatgcca

SEQ ID NO: 7542 - DNA, 25 bp, Homo sapiens
ataagatttgttgtccattgttcat

SEQ ID NO: 7543 - DNA, 25 bp, Homo sapiens
gaccaatctttatttgtactggcca

SEQ ID NO: 7544 - DNA, 25 bp, Homo sapiens
gactatttttgtaaagctctactgt

SEQ ID NO: 7545 - DNA, 25 bp, Homo sapiens
gagagagttgagaccaatctttatt

SEQ ID NO: 7546 - DNA, 25 bp, Homo sapiens
gccatggtgctttcagtttaatgct

SEQ ID NO: 7547 - DNA, 25 bp, Homo sapiens
gtctctgtcagataaactctcaaat

SEQ ID NO: 7548 - DNA, 25 bp, Homo sapiens
gttactagactttatgccatggtgc

SEQ ID NO: 7549 - DNA, 25 bp, Homo sapiens
gttataatcgaatgtcacgtttttg

SEQ ID NO: 7550 - DNA, 25 bp, Homo sapiens
tgttgtccattgttcattgttattg

SEQ ID NO: 7551 - DNA, 25 bp, Homo sapiens
aacccttacactttggctatgaaca

SEQ ID NO: 7552 - DNA, 25 bp, Homo sapiens
actgtctgtgtgaagcaatcattta

SEQ ID NO: 7553 - DNA, 25 bp, Homo sapiens
cttatctgtgcagtacaggttgctt

SEQ ID NO: 7554 - DNA, 25 bp, Homo sapiens
cttttctccttatctgtgcagtaca

SEQ ID NO: 7555 - DNA, 25 bp, Homo sapiens
gaggtggaaaaatagccccaagcag

SEQ ID NO: 7556 - DNA, 25 bp, Homo sapiens
gatcaacaattctttttgggggtag

SEQ ID NO: 7557 - DNA, 25 bp, Homo sapiens
ggagggtaggtctgcattataactg

SEQ ID NO: 7558 - DNA, 25 bp, Homo sapiens
gggtaaagtcggaccagtgtcaagg

SEQ ID NO: 7559 - DNA, 25 bp, Homo sapiens
tagaaaacccttacactttggctat

SEQ ID NO: 7560 - DNA, 25 bp, Homo sapiens
ttctaagtttattgccttgggttat

SEQ ID NO: 7561 - DNA, 25 bp, Homo sapiens
ttgccttgggttattatggaatgat

SEQ ID NO: 7562 - DNA, 25 bp, Homo sapiens
aaagctctttacctcttgctatttt

SEQ ID NO: 7563 - DNA, 25 bp, Homo sapiens
aatgcaaagctctttacctcttgct

SEQ ID NO: 7564 - DNA, 25 bp, Homo sapiens
aatgctcagagatcttttttcactg

SEQ ID NO: 7565 - DNA, 25 bp, Homo sapiens
atgacaaaggtctattgaatttatt

SEQ ID NO: 7566 - DNA, 25 bp, Homo sapiens
ctctttacctcttgctattttgtta

SEQ ID NO: 7567 - DNA, 25 bp, Homo sapiens
ctgctaatgctcagagatctttttt

SEQ ID NO: 7568 - DNA, 25 bp, Homo sapiens
gcccctaatgcaaagctctttacct

SEQ ID NO: 7569 - DNA, 25 bp, Homo sapiens
gtctcttcataccggttttatgaca

SEQ ID NO: 7570 - DNA, 25 bp, Homo sapiens
tacctcttgctattttgttatatat

SEQ ID NO: 7571 - DNA, 25 bp, Homo sapiens
tatgggtattacctttgtctcttca

SEQ ID NO: 7572 - DNA, 25 bp, Homo sapiens
tttgtctcttcataccggttttatg

SEQ ID NO: 7573 - DNA, 25 bp, Homo sapiens
aagactttgatcagggccaggctac

SEQ ID NO: 7574 - DNA, 25 bp, Homo sapiens
ataggaactccttacagtctgctgt

SEQ ID NO: 7575 - DNA, 25 bp, Homo sapiens
catcaaagcgaaatcctcagcaagc

SEQ ID NO: 7576 - DNA, 25 bp, Homo sapiens
ccacgaatggacctgaacatcagcc

SEQ ID NO: 7577 - DNA, 25 bp, Homo sapiens
cctgtacctgccagagattatctta

SEQ ID NO: 7578 - DNA, 25 bp, Homo sapiens
ctcaccccagatttccacgaatgga

SEQ ID NO: 7579 - DNA, 25 bp, Homo sapiens
gaattgaccctatcttggacagcac

SEQ ID NO: 7580 - DNA, 25 bp, Homo sapiens
gataggaatcatttgccttattata

SEQ ID NO: 7581 - DNA, 25 bp, Homo sapiens
gggagatatttacgttctcacccca

SEQ ID NO: 7582 - DNA, 25 bp, Homo sapiens
gtctgctgtatctaacattgcccag

SEQ ID NO: 7583 - DNA, 25 bp, Homo sapiens
gtgacacatcatactttaagcagga

SEQ ID NO: 7584 - DNA, 25 bp, Homo sapiens
aagtgcataactatttttgaccagc

SEQ ID NO: 7585 - DNA, 25 bp, Homo sapiens
acagctttgtacttacattgtgcca

SEQ ID NO: 7586 - DNA, 25 bp, Homo sapiens
ccctttgccccataatcagtatttg

SEQ ID NO: 7587 - DNA, 25 bp, Homo sapiens
ccgtcccacgttacatcaaattcag

SEQ ID NO: 7588 - DNA, 25 bp, Homo sapiens
gaccagcagaaggcgatacgcttca

SEQ ID NO: 7589 - DNA, 25 bp, Homo sapiens
gctactcttaattttcatgttggtg

SEQ ID NO: 7590 - DNA, 25 bp, Homo sapiens
ggtgatgaaattcccagtggtgttt

SEQ ID NO: 7591 - DNA, 25 bp, Homo sapiens
taaggttctatcttgtgccatgatg

SEQ ID NO: 7592 - DNA, 25 bp, Homo sapiens
tcccagtggtgtttcttaaggttct

SEQ ID NO: 7593 - DNA, 25 bp, Homo sapiens
tgccaaattacatgcaattccttaa

SEQ ID NO: 7594 - DNA, 25 bp, Homo sapiens
tggtaaaaggcctacagctttgtac

SEQ ID NO: 7595 - DNA, 25 bp, Homo sapiens
aaaggtactatgtgtccatgtcatt

SEQ ID NO: 7596 - DNA, 25 bp, Homo sapiens
aacacagcagttgcaataaccttgg

SEQ ID NO: 7597 - DNA, 25 bp, Homo sapiens
agcccccatacatagagtgggactc

SEQ ID NO: 7598 - DNA, 25 bp, Homo sapiens
aggagacaaagctaccacatgtgga

SEQ ID NO: 7599 - DNA, 25 bp, Homo sapiens
ataaccttggcttgtttcggacttg

SEQ ID NO: 7600 - DNA, 25 bp, Homo sapiens
caagcctattgactaccttaaccca

SEQ ID NO: 7601 - DNA, 25 bp, Homo sapiens
ctctacaaattccctcttggtgtaa

SEQ ID NO: 7602 - DNA, 25 bp, Homo sapiens
ggacttgctcgggagggtaatcaca

SEQ ID NO: 7603 - DNA, 25 bp, Homo sapiens
gtgggactcttggaatcaggagaca

SEQ ID NO: 7604 - DNA, 25 bp, Homo sapiens
gttatccttctaaagacttgttctt

SEQ ID NO: 7605 - DNA, 25 bp, Homo sapiens
taagcacacttacataagcccccat

SEQ ID NO: 7606 - DNA, 25 bp, Homo sapiens
gacaggttctgtcaggggtgacacc

SEQ ID NO: 7607 - DNA, 25 bp, Homo sapiens
gactgttcacgccagagtgcttatt

SEQ ID NO: 7608 - DNA, 25 bp, Homo sapiens
gagcgctgagaagactgttcacgcc

SEQ ID NO: 7609 - DNA, 25 bp, Homo sapiens
gaggacagtgctgatcgtgtctcag

SEQ ID NO: 7610 - DNA, 25 bp, Homo sapiens
ggacaggttctgttgggggtgacaa

SEQ ID NO: 7611 - DNA, 25 bp, Homo sapiens
ggacaggttctgttgggggtgacac

SEQ ID NO: 7612 - DNA, 25 bp, Homo sapiens
gttctgtcgggggtgacaccaggag

SEQ ID NO: 7613 - DNA, 25 bp, Homo sapiens
gtttgggcgcagatggtggagttgg

SEQ ID NO: 7614 - DNA, 25 bp, Homo sapiens
taagcaaccaggtagtgttcctaac

SEQ ID NO: 7615 - DNA, 25 bp, Homo sapiens
tggagttgggctggcatcatgtcct

SEQ ID NO: 7616 - DNA, 25 bp, Homo sapiens
tttacaccttctaatatcctgtcca

SEQ ID NO: 7617 - DNA, 25 bp, Homo sapiens
atttcccttgctagtgtgcagatat

SEQ ID NO: 7618 - DNA, 25 bp, Homo sapiens
caagcatgtgcagtcacgggagctc

SEQ ID NO: 7619 - DNA, 25 bp, Homo sapiens
cctggacaagcatgtgcagtcacgg

SEQ ID NO: 7620 - DNA, 25 bp, Homo sapiens
gatatttccctaacatgtccttttt

SEQ ID NO: 7621 - DNA, 25 bp, Homo sapiens
gcatgtgcagtcacgggagctcagc

SEQ ID NO: 7622 - DNA, 25 bp, Homo sapiens
gctatttcccttgctagtgtgcaga

SEQ ID NO: 7623 - DNA, 25 bp, Homo sapiens
gtgcagatatttccctaacatgtcc

SEQ ID NO: 7624 - DNA, 25 bp, Homo sapiens
tatttccctaacatgtccttttttg

SEQ ID NO: 7625 - DNA, 25 bp, Homo sapiens
tgcagtcacgggagctcagctcagg

SEQ ID NO: 7626 - DNA, 25 bp, Homo sapiens
tgtatttgtttgtacggaccataaa

SEQ ID NO: 7627 - DNA, 25 bp, Homo sapiens
tttgtatttgtttgtacggaccata

SEQ ID NO: 7628 - DNA, 25 bp, Homo sapiens
actaaccaattactttcccagatca

SEQ ID NO: 7629 - DNA, 25 bp, Homo sapiens
agatcatagacctctctgcatagta

SEQ ID NO: 7630 - DNA, 25 bp, Homo sapiens
agggctctggtcactagattgcaac

SEQ ID NO: 7631 - DNA, 25 bp, Homo sapiens
agggctgactttccattgttatcat

SEQ ID NO: 7632 - DNA, 25 bp, Homo sapiens
atgccctcccataaaaacacattga

SEQ ID NO: 7633 - DNA, 25 bp, Homo sapiens
cctcatctcaccattgtattgctat

SEQ ID NO: 7634 - DNA, 25 bp, Homo sapiens
gaacgaacatcctactctatgattt

SEQ ID NO: 7635 - DNA, 25 bp, Homo sapiens
gattgcaacctgtgtgtttgtcatc

SEQ ID NO: 7636 - DNA, 25 bp, Homo sapiens
ggtagatcccgaagcacagagacat

SEQ ID NO: 7637 - DNA, 25 bp, Homo sapiens
gtcaccattcccacaagtatacttg

SEQ ID NO: 7638 - DNA, 25 bp, Homo sapiens
ttactgcctttgctaggcttttgct

SEQ ID NO: 7639 - DNA, 25 bp, Homo sapiens
acaacttcaatccggtggagaacaa

SEQ ID NO: 7640 - DNA, 25 bp, Homo sapiens
accagcaacaacttcaatccggtgg

SEQ ID NO: 7641 - DNA, 25 bp, Homo sapiens
agcaacaacttcaatccggtggaga

SEQ ID NO: 7642 - DNA, 25 bp, Homo sapiens
cacaaagaatgacataggaccctat

SEQ ID NO: 7643 - DNA, 25 bp, Homo sapiens
ctcagcgccacaaagaatgacatag

SEQ ID NO: 7644 - DNA, 25 bp, Homo sapiens
gatattgtggttttaacctgtcaac

SEQ ID NO: 7645 - DNA, 25 bp, Homo sapiens
gttttaacctgtcaacctgagactc

SEQ ID NO: 7646 - DNA, 25 bp, Homo sapiens
tcaccctgaatgtccgctatgagtc

SEQ ID NO: 7647 - DNA, 25 bp, Homo sapiens
tgaatgtccgctatgagtcagtaca

SEQ ID NO: 7648 - DNA, 25 bp, Homo sapiens
ttaacctgtcaacctgagactcaga

SEQ ID NO: 7649 - DNA, 25 bp, Homo sapiens
ttgtggttttaacctgtcaacctga

SEQ ID NO: 7650 - DNA, 25 bp, Homo sapiens
aaatgccatatactcacactgaaac

SEQ ID NO: 7651 - DNA, 25 bp, Homo sapiens
agtcctttctgctttaactcttaga

SEQ ID NO: 7652 - DNA, 25 bp, Homo sapiens
atattagttaccctggtgtgctgta

SEQ ID NO: 7653 - DNA, 25 bp, Homo sapiens
caaactctcatttaggtgacagcct

SEQ ID NO: 7654 - DNA, 25 bp, Homo sapiens
catgcagccattcgtcaaatgtcaa

SEQ ID NO: 7655 - DNA, 25 bp, Homo sapiens
ctgttctactgttgtattgcccagt

SEQ ID NO: 7656 - DNA, 25 bp, Homo sapiens
gacagcctggtgactccagaatgga

SEQ ID NO: 7657 - DNA, 25 bp, Homo sapiens
gagtccaggctgtctgagtcagcac

SEQ ID NO: 7658 - DNA, 25 bp, Homo sapiens
ggagccagtcatgctaaatgccata

SEQ ID NO: 7659 - DNA, 25 bp, Homo sapiens
tgtgctgtattctctaaaaccttta

SEQ ID NO: 7660 - DNA, 25 bp, Homo sapiens
ttatattcttctgttcctggattcc

SEQ ID NO: 7661 - DNA, 25 bp, Homo sapiens
aaataggcactcacaatgacaacca

SEQ ID NO: 7662 - DNA, 25 bp, Homo sapiens
aactggttgctcaagttgatagaaa

SEQ ID NO: 7663 - DNA, 25 bp, Homo sapiens
aatcagttaccttgcagaaagagct

SEQ ID NO: 7664 - DNA, 25 bp, Homo sapiens
atttcttcctgattgacaacagtgt

SEQ ID NO: 7665 - DNA, 25 bp, Homo sapiens
gaaagagctttgtatgacagacatt

SEQ ID NO: 7666 - DNA, 25 bp, Homo sapiens
gcactcacaatgacaaccagagcca

SEQ ID NO: 7667 - DNA, 25 bp, Homo sapiens
ggatcataggcaaatcagttacctt

SEQ ID NO: 7668 - DNA, 25 bp, Homo sapiens
ggtgcaaagcgaaactggttgctca

SEQ ID NO: 7669 - DNA, 25 bp, Homo sapiens
gtatgacagacattgtcttatttta

SEQ ID NO: 7670 - DNA, 25 bp, Homo sapiens
tgtattcatgcagaacaactatctt

SEQ ID NO: 7671 - DNA, 25 bp, Homo sapiens
ttttcatatgtgatgtattcatgca

SEQ ID NO: 7672 - DNA, 25 bp, Homo sapiens
aggagacaacaatgtccctgctacc

SEQ ID NO: 7673 - DNA, 25 bp, Homo sapiens
caaagggcgaccacttgtctgtttc

SEQ ID NO: 7674 - DNA, 25 bp, Homo sapiens
ccaagtgtgctttggtcgtcgtgtg

SEQ ID NO: 7675 - DNA, 25 bp, Homo sapiens
gaacatgccctttcaggatggccaa

SEQ ID NO: 7676 - DNA, 25 bp, Homo sapiens
gataaccagacttcatgttgccaag

SEQ ID NO: 7677 - DNA, 25 bp, Homo sapiens
gtctctacgtgaacttgggattcca

SEQ ID NO: 7678 - DNA, 25 bp, Homo sapiens
gtgagtatggggcctggaagcagca

SEQ ID NO: 7679 - DNA, 25 bp, Homo sapiens
tcctcttacacctttgaccatagaa

SEQ ID NO: 7680 - DNA, 25 bp, Homo sapiens
tctttgtctactggttctactgtga

SEQ ID NO: 7681 - DNA, 25 bp, Homo sapiens
tggtcaatggccaatcctcttacac

SEQ ID NO: 7682 - DNA, 25 bp, Homo sapiens
tgttgccaaggaatccctgtctcta

SEQ ID NO: 7683 - DNA, 25 bp, Homo sapiens
aacagatcctggcattctctcagaa

SEQ ID NO: 7684 - DNA, 25 bp, Homo sapiens
accacaccgacctgcgatgagaagg

SEQ ID NO: 7685 - DNA, 25 bp, Homo sapiens
acgacaaggaacagacagtgagcat

SEQ ID NO: 7686 - DNA, 25 bp, Homo sapiens
ccattcagcttcacagagaacagat

SEQ ID NO: 7687 - DNA, 25 bp, Homo sapiens
cctgcgatgagaaggtcgtctggac

SEQ ID NO: 7688 - DNA, 25 bp, Homo sapiens
ctgcgatgatggctcacttctgcac

SEQ ID NO: 7689 - DNA, 25 bp, Homo sapiens
gagaacagatcctggcattctctca

SEQ ID NO: 7690 - DNA, 25 bp, Homo sapiens
gagcccattcagcttcacagagaac

SEQ ID NO: 7691 - DNA, 25 bp, Homo sapiens
gcccattcagcttcacagagaacag

SEQ ID NO: 7692 - DNA, 25 bp, Homo sapiens
gctgtactacgacaaggaacagaca

SEQ ID NO: 7693 - DNA, 25 bp, Homo sapiens
tgagaaggtcgtctggactgtgttc

SEQ ID NO: 7694 - DNA, 25 bp, Homo sapiens
aaagctcttcttaagcctcttggat

SEQ ID NO: 7695 - DNA, 25 bp, Homo sapiens
agagcttcctgcagtcaatgatcac

SEQ ID NO: 7696 - DNA, 25 bp, Homo sapiens
agaggatatcgtgactaccgtccag

SEQ ID NO: 7697 - DNA, 25 bp, Homo sapiens
agatggagattggctcccaactcct

SEQ ID NO: 7698 - DNA, 25 bp, Homo sapiens
agcagaaggcaagcaccaggctcac

SEQ ID NO: 7699 - DNA, 25 bp, Homo sapiens
gactgagagcagctccgagtccatc

SEQ ID NO: 7700 - DNA, 25 bp, Homo sapiens
gattatcactcgagatggcttcctg

SEQ ID NO: 7701 - DNA, 25 bp, Homo sapiens
gcaaaggcgtgagcctcttcgacat

SEQ ID NO: 7702 - DNA, 25 bp, Homo sapiens
gtgtttacagccctcatgaacagca

SEQ ID NO: 7703 - DNA, 25 bp, Homo sapiens
tcttcgacatcatcaaccctgagat

SEQ ID NO: 7704 - DNA, 25 bp, Homo sapiens
tgaggtcatgtctcggctcgaggta

SEQ ID NO: 7705 - DNA, 25 bp, Homo sapiens
aaaaggtgaggtgctgccacttcct

SEQ ID NO: 7706 - DNA, 25 bp, Homo sapiens
aaattggatctgtgtaccgactccc

SEQ ID NO: 7707 - DNA, 25 bp, Homo sapiens
aatctatgccactcagaatctcctt

SEQ ID NO: 7708 - DNA, 25 bp, Homo sapiens
agtagttaattctgtcactcaccac

SEQ ID NO: 7709 - DNA, 25 bp, Homo sapiens
atcagtctctgaatcatgtccaggg

SEQ ID NO: 7710 - DNA, 25 bp, Homo sapiens
cactcaccactacatcacttgagac

SEQ ID NO: 7711 - DNA, 25 bp, Homo sapiens
ctagagtctctgttactgcttgggc

SEQ ID NO: 7712 - DNA, 25 bp, Homo sapiens
gcaccacaaacatcctctaaagcca

SEQ ID NO: 7713 - DNA, 25 bp, Homo sapiens
gttcttttcaacctactttcatact

SEQ ID NO: 7714 - DNA, 25 bp, Homo sapiens
taaagccagacaatcagccctttcc

SEQ ID NO: 7715 - DNA, 25 bp, Homo sapiens
ttgggctatacctgggcatactaat

SEQ ID NO: 7716 - DNA, 25 bp, Homo sapiens
aaagcatatttcttggccttgctcc

SEQ ID NO: 7717 - DNA, 25 bp, Homo sapiens
aacagcccctgatcaactaagtttt

SEQ ID NO: 7718 - DNA, 25 bp, Homo sapiens
aactctgcagcttcaactgtacttc

SEQ ID NO: 7719 - DNA, 25 bp, Homo sapiens
ggccttgctccacaggacataggca

SEQ ID NO: 7720 - DNA, 25 bp, Homo sapiens
gtcccatgctactgattggcacgtg

SEQ ID NO: 7721 - DNA, 25 bp, Homo sapiens
taaagcccctttgtgaaactgttct

SEQ ID NO: 7722 - DNA, 25 bp, Homo sapiens
taagttttgtggtacttcaccctct

SEQ ID NO: 7723 - DNA, 25 bp, Homo sapiens
tctgccctcatttcatgtgacagcc

SEQ ID NO: 7724 - DNA, 25 bp, Homo sapiens
tgcaaatatacttcctcttcttttt

SEQ ID NO: 7725 - DNA, 25 bp, Homo sapiens
tggcctctctgagatttcctagagt

SEQ ID NO: 7726 - DNA, 25 bp, Homo sapiens
ttttgcccacctctgcaatagtgat

SEQ ID NO: 7727 - DNA, 25 bp, Homo sapiens
acccgtggatcgtgacgactcgaaa

SEQ ID NO: 7728 - DNA, 25 bp, Homo sapiens
ccccgtagttgctctttcggtagtg

SEQ ID NO: 7729 - DNA, 25 bp, Homo sapiens
cctgcgagccctttttatttgagaa

SEQ ID NO: 7730 - DNA, 25 bp, Homo sapiens
gaacaaatccgaaaaggcttggagt

SEQ ID NO: 7731 - DNA, 25 bp, Homo sapiens
gcaggctagatccgaggtggcagct

SEQ ID NO: 7732 - DNA, 25 bp, Homo sapiens
gtgacgactcgaaataacagaaaca

SEQ ID NO: 7733 - DNA, 25 bp, Homo sapiens
gttgctctttcggtagtggcgatgc

SEQ ID NO: 7734 - DNA, 25 bp, Homo sapiens
tgcgtcggttcgttttgattctttt

SEQ ID NO: 7735 - DNA, 25 bp, Homo sapiens
tgctaaatgtccccggacggttctg

SEQ ID NO: 7736 - DNA, 25 bp, Homo sapiens
tttcagtgcgtcggttcgttttgat

SEQ ID NO: 7737 - DNA, 25 bp, Homo sapiens
tttcggtagtggcgatgcgccctgc

SEQ ID NO: 7738 - DNA, 25 bp, Homo sapiens
aacgacccaagagtacgagccagcc

SEQ ID NO: 7739 - DNA, 25 bp, Homo sapiens
aagtggacagcaacacaagctccca

SEQ ID NO: 7740 - DNA, 25 bp, Homo sapiens
agaaactcgccaatagccggcgggc

SEQ ID NO: 7741 - DNA, 25 bp, Homo sapiens
cagccagtcttgaggcaacacctgc

SEQ ID NO: 7742 - DNA, 25 bp, Homo sapiens
caggccaggctgtctagtgtaattg

SEQ ID NO: 7743 - DNA, 25 bp, Homo sapiens
gaaccaagcccaatggccacattgc

SEQ ID NO: 7744 - DNA, 25 bp, Homo sapiens
gcctttcctgggcatacagaacccc

SEQ ID NO: 7745 - DNA, 25 bp, Homo sapiens
gctaaccaagaccctattgctgtat

SEQ ID NO: 7746 - DNA, 25 bp, Homo sapiens
ggccgcttctcgacacaggaagaaa

SEQ ID NO: 7747 - DNA, 25 bp, Homo sapiens
gtaggtgaagatacgcctttcctgg

SEQ ID NO: 7748 - DNA, 25 bp, Homo sapiens
tgacagcaggactaacccagcaggc

SEQ ID NO: 7749 - DNA, 25 bp, Homo sapiens
atacttatcccaatgaatgcgtgtt

SEQ ID NO: 7750 - DNA, 25 bp, Homo sapiens
cagacttctatcctcattcaaaaat

SEQ ID NO: 7751 - DNA, 25 bp, Homo sapiens
cagttttcaactgacctctggacgc

SEQ ID NO: 7752 - DNA, 25 bp, Homo sapiens
cattcaaaaatctgggccttgctga

SEQ ID NO: 7753 - DNA, 25 bp, Homo sapiens
ctctggacgcagaacttcagccatg

SEQ ID NO: 7754 - DNA, 25 bp, Homo sapiens
gagacgtggtaagtgcggtgcagtt

SEQ ID NO: 7755 - DNA, 25 bp, Homo sapiens
gccatgaaggtaacaggcatctttc

SEQ ID NO: 7756 - DNA, 25 bp, Homo sapiens
ggccctgttgagtctatctggtaac

SEQ ID NO: 7757 - DNA, 25 bp, Homo sapiens
gtctatctggtaacactggagctga

SEQ ID NO: 7758 - DNA, 25 bp, Homo sapiens
tatatgaccctgtctgtgggactga

SEQ ID NO: 7759 - DNA, 25 bp, Homo sapiens
ttttgaaatcccatcaggtcaccgc

SEQ ID NO: 7760 - DNA, 25 bp, Homo sapiens
ccatctcagcttgcaagtctggctc

SEQ ID NO: 7761 - DNA, 25 bp, Homo sapiens
ccctcctgctggtacctaatgggga

SEQ ID NO: 7762 - DNA, 25 bp, Homo sapiens
gaacgcgaccattggtgtcttctgc

SEQ ID NO: 7763 - DNA, 25 bp, Homo sapiens
gaacggcgagtggggctaccacttc

SEQ ID NO: 7764 - DNA, 25 bp, Homo sapiens
gcgggagcttacttgctcaaccgca

SEQ ID NO: 7765 - DNA, 25 bp, Homo sapiens
gctcaaccgcactctatgggatcgg

SEQ ID NO: 7766 - DNA, 25 bp, Homo sapiens
ggaaaccgctgcaggatgctgcgct

SEQ ID NO: 7767 - DNA, 25 bp, Homo sapiens
ggagctgggctccgaaatggaccca

SEQ ID NO: 7768 - DNA, 25 bp, Homo sapiens
ggggcctaatggtactgtgtccagg

SEQ ID NO: 7769 - DNA, 25 bp, Homo sapiens
taatggggagacctcctggaccaac

SEQ ID NO: 7770 - DNA, 25 bp, Homo sapiens
tgggatccagctggtgaacgcgacc

SEQ ID NO: 7771 - DNA, 25 bp, Homo sapiens
acatgagacttcgcaaatctctgga

SEQ ID NO: 7772 - DNA, 25 bp, Homo sapiens
ctcggatgggctctctgacaaggag

SEQ ID NO: 7773 - DNA, 25 bp, Homo sapiens
ctctgacaaggagtgtgccgtgcgc

SEQ ID NO: 7774 - DNA, 25 bp, Homo sapiens
gaagactcagatgtctctgggcaag

SEQ ID NO: 7775 - DNA, 25 bp, Homo sapiens
gaagatctcgtgactatactggcat

SEQ ID NO: 7776 - DNA, 25 bp, Homo sapiens
gagaaccccatgcagtttgaagaat

SEQ ID NO: 7777 - DNA, 25 bp, Homo sapiens
gctgtgtgtggaggaacgtggctat

SEQ ID NO: 7778 - DNA, 25 bp, Homo sapiens
ggaatacacatcctgaagatctcgt

SEQ ID NO: 7779 - DNA, 25 bp, Homo sapiens
gggagtgttctgatgccacagttag

SEQ ID NO: 7780 - DNA, 25 bp, Homo sapiens
gtgcgccgtgtgaagactcagatgt

SEQ ID NO: 7781 - DNA, 25 bp, Homo sapiens
tatactggcatttcagatccacccc

SEQ ID NO: 7782 - DNA, 25 bp, Homo sapiens
agacccggaatccagtgggcagagg

SEQ ID NO: 7783 - DNA, 25 bp, Homo sapiens
aggactggtaagcgactgtcatcaa

SEQ ID NO: 7784 - DNA, 25 bp, Homo sapiens
cacggtcatccggagtactaagccc

SEQ ID NO: 7785 - DNA, 25 bp, Homo sapiens
ccccgctacagaagccagactgggt

SEQ ID NO: 7786 - DNA, 25 bp, Homo sapiens
ccgagcggcagtacgagctgcagcc

SEQ ID NO: 7787 - DNA, 25 bp, Homo sapiens
ctcgcacggtcatccggagtactaa

SEQ ID NO: 7788 - DNA, 25 bp, Homo sapiens
gccaccgagcggcagtacgagctgc

SEQ ID NO: 7789 - DNA, 25 bp, Homo sapiens
gtaagcgactgtcatcaagtaaggc

SEQ ID NO: 7790 - DNA, 25 bp, Homo sapiens
tacagaagccagactgggtcccgcg

SEQ ID NO: 7791 - DNA, 25 bp, Homo sapiens
tcctgcagtcggtgctggaggactt

SEQ ID NO: 7792 - DNA, 25 bp, Homo sapiens
ttctcagacccggaatccagtgggc

SEQ ID NO: 7793 - DNA, 25 bp, Homo sapiens
acatcagagacaaggaagcccccca

SEQ ID NO: 7794 - DNA, 25 bp, Homo sapiens
agcacctgttgtatgtcacatgcct

SEQ ID NO: 7795 - DNA, 25 bp, Homo sapiens
cagaagagctgggcaccttagcgac

SEQ ID NO: 7796 - DNA, 25 bp, Homo sapiens
caggatgcctgcgagggcgacagtg

SEQ ID NO: 7797 - DNA, 25 bp, Homo sapiens
catcctcggggaccggcaggatgcc

SEQ ID NO: 7798 - DNA, 25 bp, Homo sapiens
ctcttttgggctcttctggagggaa

SEQ ID NO: 7799 - DNA, 25 bp, Homo sapiens
gcagatccaagttttgcggggtcta

SEQ ID NO: 7800 - DNA, 25 bp, Homo sapiens
gcgacagtggggggcccatggtcgc

SEQ ID NO: 7801 - DNA, 25 bp, Homo sapiens
ggcgtttacaccaaagtcagccgct

SEQ ID NO: 7802 - DNA, 25 bp, Homo sapiens
tacctcgactggatccatgggcaca

SEQ ID NO: 7803 - DNA, 25 bp, Homo sapiens
tccttcacaactacggcgtttacac

SEQ ID NO: 7804 - DNA, 25 bp, Homo sapiens
aaatccaggaagtccctctcctggt

SEQ ID NO: 7805 - DNA, 25 bp, Homo sapiens
agatttcgaagccacagagtctctc

SEQ ID NO: 7806 - DNA, 25 bp, Homo sapiens
atatcttcaggccatgggttcacca

SEQ ID NO: 7807 - DNA, 25 bp, Homo sapiens
atccactatcctggcaactcaaggc

SEQ ID NO: 7808 - DNA, 25 bp, Homo sapiens
gaactcaccatagagacccatgtca

SEQ ID NO: 7809 - DNA, 25 bp, Homo sapiens
gaactctttctttggtattccatcc

SEQ ID NO: 7810 - DNA, 25 bp, Homo sapiens
gacccttgagaagctgccatatctt

SEQ ID NO: 7811 - DNA, 25 bp, Homo sapiens
gcaactcaaggctgcttctgttaac

SEQ ID NO: 7812 - DNA, 25 bp, Homo sapiens
ggtgctccaagcagtttgaagccca

SEQ ID NO: 7813 - DNA, 25 bp, Homo sapiens
tgatagaagtgcattctcctcctat

SEQ ID NO: 7814 - DNA, 25 bp, Homo sapiens
tgtcaactggagtgctctctcagca

SEQ ID NO: 7815 - DNA, 25 bp, Homo sapiens
actgactggacgcacgtggaaagga

SEQ ID NO: 7816 - DNA, 25 bp, Homo sapiens
aggagctatttttggaggctttaag

SEQ ID NO: 7817 - DNA, 25 bp, Homo sapiens
ctctggaaagagtatccgtaccgtc

SEQ ID NO: 7818 - DNA, 25 bp, Homo sapiens
gaatctgtcccgaaacttgtggctg

SEQ ID NO: 7819 - DNA, 25 bp, Homo sapiens
gagtaaagaatctgtcccgaaactt

SEQ ID NO: 7820 - DNA, 25 bp, Homo sapiens
ggacgcacgtggaaaggagctattt

SEQ ID NO: 7821 - DNA, 25 bp, Homo sapiens
gtcccgaaacttgtggctgacttta

SEQ ID NO: 7822 - DNA, 25 bp, Homo sapiens
gtcctgacgttttgaaacaatacag

SEQ ID NO: 7823 - DNA, 25 bp, Homo sapiens
taaattacacgtgggagctttccaa

SEQ ID NO: 7824 - DNA, 25 bp, Homo sapiens
tgaaacaatacagatgccttccctt

SEQ ID NO: 7825 - DNA, 25 bp, Homo sapiens
tgacctgcttcgctctggaaagagt

SEQ ID NO: 7826 - DNA, 25 bp, Homo sapiens
acaaatgctctgtgctctctagtga

SEQ ID NO: 7827 - DNA, 25 bp, Homo sapiens
actggagagcccttgctcagttttc

SEQ ID NO: 7828 - DNA, 25 bp, Homo sapiens
agtgttcgagggtaccaggagagct

SEQ ID NO: 7829 - DNA, 25 bp, Homo sapiens
atttgcttcctctgacaagttacct

SEQ ID NO: 7830 - DNA, 25 bp, Homo sapiens
cctcacctaatttttgcttctcagg

SEQ ID NO: 7831 - DNA, 25 bp, Homo sapiens
gaatgagaatctttggccactggag

SEQ ID NO: 7832 - DNA, 25 bp, Homo sapiens
gccataggcgcctagtgtagccatc

SEQ ID NO: 7833 - DNA, 25 bp, Homo sapiens
gccttcaagtggccgtttctggggc

SEQ ID NO: 7834 - DNA, 25 bp, Homo sapiens
ggcgatgactgaactgctgatggac

SEQ ID NO: 7835 - DNA, 25 bp, Homo sapiens
gtagccatcgagggacttgacttgt

SEQ ID NO: 7836 - DNA, 25 bp, Homo sapiens
tagtgagccctgaatttgcttcctc

SEQ ID NO: 7837 - DNA, 25 bp, Homo sapiens
aggactgtgcggagtcgtgcacacc

SEQ ID NO: 7838 - DNA, 25 bp, Homo sapiens
atgagaagctgcacaacgctgcacc

SEQ ID NO: 7839 - DNA, 25 bp, Homo sapiens
cccacagaccccacagaggatgaag

SEQ ID NO: 7840 - DNA, 25 bp, Homo sapiens
cgaacacagtggagcctctgagggg

SEQ ID NO: 7841 - DNA, 25 bp, Homo sapiens
cgcttctgcaagaccacgaacacag

SEQ ID NO: 7842 - DNA, 25 bp, Homo sapiens
gcttccccgaaagtctgggaccagg

SEQ ID NO: 7843 - DNA, 25 bp, Homo sapiens
ggaccaggtccaggtgggcatggaa

SEQ ID NO: 7844 - DNA, 25 bp, Homo sapiens
ggaggacagaagccctgtggatccc

SEQ ID NO: 7845 - DNA, 25 bp, Homo sapiens
gggcatggaatgctgatgacttgga

SEQ ID NO: 7846 - DNA, 25 bp, Homo sapiens
tgctgatgacttggagcaggcccca

SEQ ID NO: 7847 - DNA, 25 bp, Homo sapiens
tttgttgccgtttattttgtactca

SEQ ID NO: 7848 - DNA, 25 bp, Homo sapiens
acaagctgcttgactatcacataca

SEQ ID NO: 7849 - DNA, 25 bp, Homo sapiens
accactggaatcgatctgtactgta

SEQ ID NO: 7850 - DNA, 25 bp, Homo sapiens
actcctttgcattccatgattttac

SEQ ID NO: 7851 - DNA, 25 bp, Homo sapiens
atacattccctatcacaacatatca

SEQ ID NO: 7852 - DNA, 25 bp, Homo sapiens
atcaattcaacacattacttgcaca

SEQ ID NO: 7853 - DNA, 25 bp, Homo sapiens
atttgcactgttactttttagtctt

SEQ ID NO: 7854 - DNA, 25 bp, Homo sapiens
ccaacatacccttctttaaatcaca

SEQ ID NO: 7855 - DNA, 25 bp, Homo sapiens
gaatctgaagctattgatgtttcca

SEQ ID NO: 7856 - DNA, 25 bp, Homo sapiens
gattttatacatagtcacccccatg

SEQ ID NO: 7857 - DNA, 25 bp, Homo sapiens
gtcacccccatggtgggttgtcata

SEQ ID NO: 7858 - DNA, 25 bp, Homo sapiens
tttagtcttttactcctttgcattc

SEQ ID NO: 7859 - DNA, 25 bp, Homo sapiens
aagggcaagtttccatcatctatag

SEQ ID NO: 7860 - DNA, 25 bp, Homo sapiens
aatgtccccaacaagattgcttaat

SEQ ID NO: 7861 - DNA, 25 bp, Homo sapiens
actacatattgtaaagcccattttt

SEQ ID NO: 7862 - DNA, 25 bp, Homo sapiens
gctattcaattcttttaactgttgt

SEQ ID NO: 7863 - DNA, 25 bp, Homo sapiens
ggaagtccatctgcgtgtgtgcagg

SEQ ID NO: 7864 - DNA, 25 bp, Homo sapiens
gggttacttgattggtgattaggtg

SEQ ID NO: 7865 - DNA, 25 bp, Homo sapiens
gtggaccttagaatacagttttgag

SEQ ID NO: 7866 - DNA, 25 bp, Homo sapiens
gtgtgcagggagactgggtaggaaa

SEQ ID NO: 7867 - DNA, 25 bp, Homo sapiens
taaggggaggaaccagagtgctgaa

SEQ ID NO: 7868 - DNA, 25 bp, Homo sapiens
tatacctcaatgtccccaacaagat

SEQ ID NO: 7869 - DNA, 25 bp, Homo sapiens
tgtgtttcctccaagctattcaatt

SEQ ID NO: 7870 - DNA, 25 bp, Homo sapiens
cacgttggagggacccttggccagt

SEQ ID NO: 7871 - DNA, 25 bp, Homo sapiens
catcccctgaacacgtggtggtgac

SEQ ID NO: 7872 - DNA, 25 bp, Homo sapiens
catggacaagacgggtctcctgctg

SEQ ID NO: 7873 - DNA, 25 bp, Homo sapiens
ctctgccaccagagagcgcaggctg

SEQ ID NO: 7874 - DNA, 25 bp, Homo sapiens
gacaaagtgaccatcggcctgttgt

SEQ ID NO: 7875 - DNA, 25 bp, Homo sapiens
gagacgctattctcagtgatgcccg

SEQ ID NO: 7876 - DNA, 25 bp, Homo sapiens
ggaaccgaagaagctctgcgtacaa

SEQ ID NO: 7877 - DNA, 25 bp, Homo sapiens
gggagtggagatttcctgctggtct

SEQ ID NO: 7878 - DNA, 25 bp, Homo sapiens
tgcccggcctgaagatgaccatgga

SEQ ID NO: 7879 - DNA, 25 bp, Homo sapiens
tgctctggggatctccagcagcatc

SEQ ID NO: 7880 - DNA, 25 bp, Homo sapiens
ttcagggcaatgaccactctgccac

SEQ ID NO: 7881 - DNA, 25 bp, Homo sapiens
aacgtccaaaacactctggatctta

SEQ ID NO: 7882 - DNA, 25 bp, Homo sapiens
aagatggcagatcttcctcgagagc

SEQ ID NO: 7883 - DNA, 25 bp, Homo sapiens
cacagtggcccaagctgaagacttt

SEQ ID NO: 7884 - DNA, 25 bp, Homo sapiens
ctcgagagctgttcccatgggaata

SEQ ID NO: 7885 - DNA, 25 bp, Homo sapiens
gaatgacattgattctcctgtcctt

SEQ ID NO: 7886 - DNA, 25 bp, Homo sapiens
gagaagatctgtcaattcctgggaa

SEQ ID NO: 7887 - DNA, 25 bp, Homo sapiens
ggaactgtgctatatgggtcatggt

SEQ ID NO: 7888 - DNA, 25 bp, Homo sapiens
gtacctgactggggtcattgtgtaa

SEQ ID NO: 7889 - DNA, 25 bp, Homo sapiens
tccaattattccctcctgagtgttg

SEQ ID NO: 7890 - DNA, 25 bp, Homo sapiens
tcctgtccttgtacatgtacctgac

SEQ ID NO: 7891 - DNA, 25 bp, Homo sapiens
tgaccacattcatggctggatgccc

SEQ ID NO: 7892 - DNA, 25 bp, Homo sapiens
aataagaaatagctacagtgacaga

SEQ ID NO: 7893 - DNA, 25 bp, Homo sapiens
acaagaataatgtacgtactaccta

SEQ ID NO: 7894 - DNA, 25 bp, Homo sapiens
agagaaccagggttcaaagcccagg

SEQ ID NO: 7895 - DNA, 25 bp, Homo sapiens
atgtttgcaatgtttcccgtttaca

SEQ ID NO: 7896 - DNA, 25 bp, Homo sapiens
gactaggttcagagaaccagggttc

SEQ ID NO: 7897 - DNA, 25 bp, Homo sapiens
gagtcatgggatcccagactttttt

SEQ ID NO: 7898 - DNA, 25 bp, Homo sapiens
gcaatgtttcccgtttacagaatgc

SEQ ID NO: 7899 - DNA, 25 bp, Homo sapiens
gcagtgagttgagtcatgggatccc

SEQ ID NO: 7900 - DNA, 25 bp, Homo sapiens
gccagggcattggctcatgtctgta

SEQ ID NO: 7901 - DNA, 25 bp, Homo sapiens
gtacgtactacctaaaaggatgtct

SEQ ID NO: 7902 - DNA, 25 bp, Homo sapiens
gtttcccgtttacagaatgctacaa

SEQ ID NO: 7903 - DNA, 25 bp, Homo sapiens
ccagcaacctctacatccaggaatg

SEQ ID NO: 7904 - DNA, 25 bp, Homo sapiens
ctcccccatagacacactagtggtc

SEQ ID NO: 7905 - DNA, 25 bp, Homo sapiens
ctgggcgagatgagcaccgagcaca

SEQ ID NO: 7906 - DNA, 25 bp, Homo sapiens
gagacacgcccagtggatgatccta

SEQ ID NO: 7907 - DNA, 25 bp, Homo sapiens
gaggccgtggctatggttggaggtc

SEQ ID NO: 7908 - DNA, 25 bp, Homo sapiens
gatggctctgtgaagctggtgaccc

SEQ ID NO: 7909 - DNA, 25 bp, Homo sapiens
ggtcagcttcaggccttctggaagc

SEQ ID NO: 7910 - DNA, 25 bp, Homo sapiens
gtgtcaggaactagtccttgcaccc

SEQ ID NO: 7911 - DNA, 25 bp, Homo sapiens
tacaggagctgagagaccctaccct

SEQ ID NO: 7912 - DNA, 25 bp, Homo sapiens
tagtggtcatggcatgtcctcatct

SEQ ID NO: 7913 - DNA, 25 bp, Homo sapiens
tctaggctcggatcagctgctacag

SEQ ID NO: 7914 - DNA, 25 bp, Homo sapiens
aagctgcggaactctgaacgggcgc

SEQ ID NO: 7915 - DNA, 25 bp, Homo sapiens
agaaatggagggcgcccaggatcca

SEQ ID NO: 7916 - DNA, 25 bp, Homo sapiens
agatcctgatacctctgtggggact

SEQ ID NO: 7917 - DNA, 25 bp, Homo sapiens
agatgctgctccaaccatgcagttc

SEQ ID NO: 7918 - DNA, 25 bp, Homo sapiens
caccgggaacagtcagctttcttta

SEQ ID NO: 7919 - DNA, 25 bp, Homo sapiens
cgcttagcccttacccaggaaatat

SEQ ID NO: 7920 - DNA, 25 bp, Homo sapiens
cggtaccaagagcagcgcttagccc

SEQ ID NO: 7921 - DNA, 25 bp, Homo sapiens
ctgtggggactgtggggacttttgg

SEQ ID NO: 7922 - DNA, 25 bp, Homo sapiens
gaatggcagagctcacttctgtacc

SEQ ID NO: 7923 - DNA, 25 bp, Homo sapiens
tagaagcgtctgtatctctggagca

SEQ ID NO: 7924 - DNA, 25 bp, Homo sapiens
tcgaccctaggaagcttgactgttg

SEQ ID NO: 7925 - DNA, 25 bp, Homo sapiens
aacccagacgggtagccagctataa

SEQ ID NO: 7926 - DNA, 25 bp, Homo sapiens
aatgtacttaggcttggctgccctg

SEQ ID NO: 7927 - DNA, 25 bp, Homo sapiens
acagctgcactgaggcagcgacctc

SEQ ID NO: 7928 - DNA, 25 bp, Homo sapiens
caagtgtcctgaaagcttacatttt

SEQ ID NO: 7929 - DNA, 25 bp, Homo sapiens
ctgaggcagcgacctcaagtgtcct

SEQ ID NO: 7930 - DNA, 25 bp, Homo sapiens
gcagttgttccagggagcttctacc

SEQ ID NO: 7931 - DNA, 25 bp, Homo sapiens
gctgccctgtctggaacatggactt

SEQ ID NO: 7932 - DNA, 25 bp, Homo sapiens
ggactttcttgcatgaatcagatgt

SEQ ID NO: 7933 - DNA, 25 bp, Homo sapiens
ggcactctggaatacttgcagctga

SEQ ID NO: 7934 - DNA, 25 bp, Homo sapiens
gtgaaataactaccttccactctgg

SEQ ID NO: 7935 - DNA, 25 bp, Homo sapiens
tccactctggaaccttattccagca

SEQ ID NO: 7936 - DNA, 25 bp, Homo sapiens
aatggatgcccctcaagaagtttac

SEQ ID NO: 7937 - DNA, 25 bp, Homo sapiens
aatgtttgacatgcagtgcttcttt

SEQ ID NO: 7938 - DNA, 25 bp, Homo sapiens
acatgttccattggacccaggctgt

SEQ ID NO: 7939 - DNA, 25 bp, Homo sapiens
actccccaatcttatttaccacaag

SEQ ID NO: 7940 - DNA, 25 bp, Homo sapiens
gaacggtggcaaggacctgttggct

SEQ ID NO: 7941 - DNA, 25 bp, Homo sapiens
gaatctcctttgcagcaatgcctta

SEQ ID NO: 7942 - DNA, 25 bp, Homo sapiens
gagtcgcttggatgtgtatctatca

SEQ ID NO: 7943 - DNA, 25 bp, Homo sapiens
gtatctatcacataatccagcagga

SEQ ID NO: 7944 - DNA, 25 bp, Homo sapiens
gtgtgctcccgtgagatgctgaatc

SEQ ID NO: 7945 - DNA, 25 bp, Homo sapiens
tacaatcacttggactttatctggg

SEQ ID NO: 7946 - DNA, 25 bp, Homo sapiens
taggatgcactatgatcagtcccaa

SEQ ID NO: 7947 - DNA, 25 bp, Homo sapiens
aagccctgtttgcctaattaaattg

SEQ ID NO: 7948 - DNA, 25 bp, Homo sapiens
aaggctccagggaatcctgcattct

SEQ ID NO: 7949 - DNA, 25 bp, Homo sapiens
aatctcattttgctcatcttaccat

SEQ ID NO: 7950 - DNA, 25 bp, Homo sapiens
cctgcattctaattggcaagccctg

SEQ ID NO: 7951 - DNA, 25 bp, Homo sapiens
gcctgaaaatcctcaacactttgcc

SEQ ID NO: 7952 - DNA, 25 bp, Homo sapiens
gggtcgcctgactgaattacggaca

SEQ ID NO: 7953 - DNA, 25 bp, Homo sapiens
tacaggggaggggtctagctccttt

SEQ ID NO: 7954 - DNA, 25 bp, Homo sapiens
tatttcacttgtacccagtttcact

SEQ ID NO: 7955 - DNA, 25 bp, Homo sapiens
tcaccacgctgagatgctgatgtca

SEQ ID NO: 7956 - DNA, 25 bp, Homo sapiens
tcctttttctctctcatattaatct

SEQ ID NO: 7957 - DNA, 25 bp, Homo sapiens
ttacggacattcaatcatcaccacg

SEQ ID NO: 7958 - DNA, 25 bp, Homo sapiens
aagggccggtttatccatgttacag

SEQ ID NO: 7959 - DNA, 25 bp, Homo sapiens
agtgcaaacatttcgtcccaaagtc

SEQ ID NO: 7960 - DNA, 25 bp, Homo sapiens
agtttccatatttatccgcatgtaa

SEQ ID NO: 7961 - DNA, 25 bp, Homo sapiens
atccatgttacagctcttcaatatt

SEQ ID NO: 7962 - DNA, 25 bp, Homo sapiens
ggatctgcgtgtcaaactgttccat

SEQ ID NO: 7963 - DNA, 25 bp, Homo sapiens
ggcggccgaaagccaactgtttgta

SEQ ID NO: 7964 - DNA, 25 bp, Homo sapiens
gtttcatgtcctgtcaagaattcgt

SEQ ID NO: 7965 - DNA, 25 bp, Homo sapiens
tagtacgagcctggatctgcgtgtc

SEQ ID NO: 7966 - DNA, 25 bp, Homo sapiens
tctcggttggagcgggtgggtggga

SEQ ID NO: 7967 - DNA, 25 bp, Homo sapiens
tgtacgattacagtctccacgtcga

SEQ ID NO: 7968 - DNA, 25 bp, Homo sapiens
ttgtggtctttgcattgggggaggg

SEQ ID NO: 7969 - DNA, 25 bp, Homo sapiens
agggtaacttccagtgtcacaatga

SEQ ID NO: 7970 - DNA, 25 bp, Homo sapiens
catttttcttatgccgtgtgcctaa

SEQ ID NO: 7971 - DNA, 25 bp, Homo sapiens
gagaaggcactaacgctgggatgaa

SEQ ID NO: 7972 - DNA, 25 bp, Homo sapiens
gagcagttctgtaagtgggtgcctc

SEQ ID NO: 7973 - DNA, 25 bp, Homo sapiens
gccgtgtgcctaaaaacctacttga

SEQ ID NO: 7974 - DNA, 25 bp, Homo sapiens
ggtagcattgacaccttcttaggca

SEQ ID NO: 7975 - DNA, 25 bp, Homo sapiens
gtaagtgggtgcctctcagcacatt

SEQ ID NO: 7976 - DNA, 25 bp, Homo sapiens
gtagataggctgtattgattttggt

SEQ ID NO: 7977 - DNA, 25 bp, Homo sapiens
gtgagttactcagcactctcaagaa

SEQ ID NO: 7978 - DNA, 25 bp, Homo sapiens
tgcctctcagcacatttctatgaat

SEQ ID NO: 7979 - DNA, 25 bp, Homo sapiens
ttccagtgtcacaatgagcagttct

SEQ ID NO: 7980 - DNA, 25 bp, Homo sapiens
accaaacggatgaaactctgagcaa

SEQ ID NO: 7981 - DNA, 25 bp, Homo sapiens
agacctttggctcacagaactgcag

SEQ ID NO: 7982 - DNA, 25 bp, Homo sapiens
atgacagcagtctttgtgatttatt

SEQ ID NO: 7983 - DNA, 25 bp, Homo sapiens
atttccaagacaatcaatccacaag

SEQ ID NO: 7984 - DNA, 25 bp, Homo sapiens
ctggctgccccttattggagaatgt

SEQ ID NO: 7985 - DNA, 25 bp, Homo sapiens
cttctctttcttatgtctttttact

SEQ ID NO: 7986 - DNA, 25 bp, Homo sapiens
gagaaaccaactacggattgctgca

SEQ ID NO: 7987 - DNA, 25 bp, Homo sapiens
gcagcagcctcaccatgaagttgct

SEQ ID NO: 7988 - DNA, 25 bp, Homo sapiens
gttcatagacgacaatgccactaca

SEQ ID NO: 7989 - DNA, 25 bp, Homo sapiens
taactttctgcaagacctttggctc

SEQ ID NO: 7990 - DNA, 25 bp, Homo sapiens
tacggattgctgcaaaccacacctt

SEQ ID NO: 7991 - DNA, 25 bp, Homo sapiens
agaaacgaccatgtctacacgtgcc

SEQ ID NO: 7992 - DNA, 25 bp, Homo sapiens
agaggaactctaacacttctctcct

SEQ ID NO: 7993 - DNA, 25 bp, Homo sapiens
atcagctgtcaagaaatcccgggcc

SEQ ID NO: 7994 - DNA, 25 bp, Homo sapiens
caccgtttccatggtcgaaggtcag

SEQ ID NO: 7995 - DNA, 25 bp, Homo sapiens
cccacatctgcaacacagctgtgcc

SEQ ID NO: 7996 - DNA, 25 bp, Homo sapiens
gaccgctgccacggtgtgaggagct

SEQ ID NO: 7997 - DNA, 25 bp, Homo sapiens
gcaggatatccggcactgctacagc

SEQ ID NO: 7998 - DNA, 25 bp, Homo sapiens
gcaggggccgcaagtttgacggaca

SEQ ID NO: 7999 - DNA, 25 bp, Homo sapiens
tacctgggggctgtgcatgcccccc

SEQ ID NO: 8000 - DNA, 25 bp, Homo sapiens
tctacacgtgcctgcttgcaaagac

SEQ ID NO: 8001 - DNA, 25 bp, Homo sapiens
ttgacggacatcgatgtgccgggca

SEQ ID NO: 8002 - DNA, 25 bp, Homo sapiens
aaagcccttcatctaatatttgttg

SEQ ID NO: 8003 - DNA, 25 bp, Homo sapiens
aaatgcttgccgctttagaggtgga

SEQ ID NO: 8004 - DNA, 25 bp, Homo sapiens
aagccaatcatttgtaaccattcta

SEQ ID NO: 8005 - DNA, 25 bp, Homo sapiens
accatacactggatgacctagtcga

SEQ ID NO: 8006 - DNA, 25 bp, Homo sapiens
gcattcattgacacatagctctaat

SEQ ID NO: 8007 - DNA, 25 bp, Homo sapiens
gctagtagaatggcagcacgctgta

SEQ ID NO: 8008 - DNA, 25 bp, Homo sapiens
gtaaccattctagcagtgtcatatt

SEQ ID NO: 8009 - DNA, 25 bp, Homo sapiens
gtagacacctttcagtaagccaatc

SEQ ID NO: 8010 - DNA, 25 bp, Homo sapiens
tatacggtagttgctttagggggtg

SEQ ID NO: 8011 - DNA, 25 bp, Homo sapiens
tggtgctcataaaaggccccagtcg

SEQ ID NO: 8012 - DNA, 25 bp, Homo sapiens
ttactgtattgtgtactggctataa

SEQ ID NO: 8013 - DNA, 25 bp, Homo sapiens
gacaagtgggatttggggcctcaag

SEQ ID NO: 8014 - DNA, 25 bp, Homo sapiens
gagggggtggttattggactccagg

SEQ ID NO: 8015 - DNA, 25 bp, Homo sapiens
ggcttcattccggactggcagaagc

SEQ ID NO: 8016 - DNA, 25 bp, Homo sapiens
gggcctcaagaaatatactctccca

SEQ ID NO: 8017 - DNA, 25 bp, Homo sapiens
ggggcccgaacaggacttgttagag

SEQ ID NO: 8018 - DNA, 25 bp, Homo sapiens
tagagagcctgtcaccagagcttct

SEQ ID NO: 8019 - DNA, 25 bp, Homo sapiens
tctcttcctagatctgcaggctgca

SEQ ID NO: 8020 - DNA, 25 bp, Homo sapiens
tgaccaaagactgcagaacccccag

SEQ ID NO: 8021 - DNA, 25 bp, Homo sapiens
tgcacctctggctagagccgagggg

SEQ ID NO: 8022 - DNA, 25 bp, Homo sapiens
tgcctccgggcagcaaggtttacac

SEQ ID NO: 8023 - DNA, 25 bp, Homo sapiens
tttttccatctggctttttctgcca

SEQ ID NO: 8024 - DNA, 25 bp, Homo sapiens
agatgtttgagtccgagtcctaggc

SEQ ID NO: 8025 - DNA, 25 bp, Homo sapiens
cactgcggagggtgcgcatgtcggc

SEQ ID NO: 8026 - DNA, 25 bp, Homo sapiens
cggctcccagcagaacatactaggg

SEQ ID NO: 8027 - DNA, 25 bp, Homo sapiens
gaagctatttgatctgcggggcaag

SEQ ID NO: 8028 - DNA, 25 bp, Homo sapiens
gacctgagggccaacctgaagcagg

SEQ ID NO: 8029 - DNA, 25 bp, Homo sapiens
gacctgcgagacgtgggtgactgga

SEQ ID NO: 8030 - DNA, 25 bp, Homo sapiens
gagaagcagaactacctggcggagc

SEQ ID NO: 8031 - DNA, 25 bp, Homo sapiens
gagagccgccgtgaggcagagaagc

SEQ ID NO: 8032 - DNA, 25 bp, Homo sapiens
gcaggagctctgcaaacagctgcac

SEQ ID NO: 8033 - DNA, 25 bp, Homo sapiens
gctgcacgccaagatcgatgcggct

SEQ ID NO: 8034 - DNA, 25 bp, Homo sapiens
tgcggggcaagttcaagcggccccc

SEQ ID NO: 8035 - DNA, 25 bp, Homo sapiens
agtgcaagctggaggtccgagtgcc

SEQ ID NO: 8036 - DNA, 25 bp, Homo sapiens
caaggagtcctgacgctgaacatcc

SEQ ID NO: 8037 - DNA, 25 bp, Homo sapiens
ctcaactgtgctgtcagaggccacc

SEQ ID NO: 8038 - DNA, 25 bp, Homo sapiens
gaagatcccaagttcctgataacca

SEQ ID NO: 8039 - DNA, 25 bp, Homo sapiens
gaatcaccttcaaaccgttcgagta

SEQ ID NO: 8040 - DNA, 25 bp, Homo sapiens
gaggccacccgaagccgaaggtggt

SEQ ID NO: 8041 - DNA, 25 bp, Homo sapiens
ggcacactagctgtactgtgtccga

SEQ ID NO: 8042 - DNA, 25 bp, Homo sapiens
tacaccgagaacatctgtgggctca

SEQ ID NO: 8043 - DNA, 25 bp, Homo sapiens
tcatagaccgcgtggtcgtggctgg

SEQ ID NO: 8044 - DNA, 25 bp, Homo sapiens
tgactcacctggtgtctccaagaac

SEQ ID NO: 8045 - DNA, 25 bp, Homo sapiens
tgtccgaccttatcgtgggcaatga

SEQ ID NO: 8046 - DNA, 25 bp, Homo sapiens
aacagcgacaacgtggtgctgcggc

SEQ ID NO: 8047 - DNA, 25 bp, Homo sapiens
caactactgccagggtcagtgcgcg

SEQ ID NO: 8048 - DNA, 25 bp, Homo sapiens
catggtggtggacgagtgcggctgc

SEQ ID NO: 8049 - DNA, 25 bp, Homo sapiens
gacaacgtggtgctgcggcagtatg

SEQ ID NO: 8050 - DNA, 25 bp, Homo sapiens
gcggcagtatgaggacatggtggtg

SEQ ID NO: 8051 - DNA, 25 bp, Homo sapiens
ggcttcctggccaactactgccagg

SEQ ID NO: 8052 - DNA, 25 bp, Homo sapiens
gtgctcttctttgacaacagcgaca

SEQ ID NO: 8053 - DNA, 25 bp, Homo sapiens
gtgctgcggcagtatgaggacatgg

SEQ ID NO: 8054 - DNA, 25 bp, Homo sapiens
tccgtgctcttctttgacaacagcg

SEQ ID NO: 8055 - DNA, 25 bp, Homo sapiens
tcttctttgacaacagcgacaacgt

SEQ ID NO: 8056 - DNA, 25 bp, Homo sapiens
tggccaactactgccagggtcagtg

SEQ ID NO: 8057 - DNA, 25 bp, Homo sapiens
aagtccccaagattcacacctgact

SEQ ID NO: 8058 - DNA, 25 bp, Homo sapiens
ccagcctggacccaatcatgaggaa

SEQ ID NO: 8059 - DNA, 25 bp, Homo sapiens
ccggtcgccaggacaatggacttcc

SEQ ID NO: 8060 - DNA, 25 bp, Homo sapiens
gacctcgagcagatgatgccaacct

SEQ ID NO: 8061 - DNA, 25 bp, Homo sapiens
gagcaatgttgcttaggatgtgtgc

SEQ ID NO: 8062 - DNA, 25 bp, Homo sapiens
gattcacacctgactctgaaatctg

SEQ ID NO: 8063 - DNA, 25 bp, Homo sapiens
gcaccaggtgatcctcaggtggcca

SEQ ID NO: 8064 - DNA, 25 bp, Homo sapiens
tccttctccaacgctgagtcttatg

SEQ ID NO: 8065 - DNA, 25 bp, Homo sapiens
tgagaggaatcctgtatgcagcccc

SEQ ID NO: 8066 - DNA, 25 bp, Homo sapiens
tggataatcccgatgggccagaccc

SEQ ID NO: 8067 - DNA, 25 bp, Homo sapiens
tggggtcccagtcctatgaggatat

SEQ ID NO: 8068 - DNA, 25 bp, Homo sapiens
cgccctggcacggtgctgagaattc

SEQ ID NO: 8069 - DNA, 25 bp, Homo sapiens
gctcatcatcgcgtcagacgacggc

SEQ ID NO: 8070 - DNA, 25 bp, Homo sapiens
gctggacacgtcggaggtggtcttc

SEQ ID NO: 8071 - DNA, 25 bp, Homo sapiens
gctggactccgtgaggatcttctga

SEQ ID NO: 8072 - DNA, 25 bp, Homo sapiens
gctgtgcggggaggagcagggctcc

SEQ ID NO: 8073 - DNA, 25 bp, Homo sapiens
gcttcaaggccgtggttggggacgc

SEQ ID NO: 8074 - DNA, 25 bp, Homo sapiens
tcccaatgccagcaggttccatgta

SEQ ID NO: 8075 - DNA, 25 bp, Homo sapiens
tcggaggtggtcttcaacagcaagg

SEQ ID NO: 8076 - DNA, 25 bp, Homo sapiens
tcttctgagcagaagcccaggcggc

SEQ ID NO: 8077 - DNA, 25 bp, Homo sapiens
tgctgagaattcgcggcttggttcc

SEQ ID NO: 8078 - DNA, 25 bp, Homo sapiens
ttccatgtaaacctgctgtgcgggg

SEQ ID NO: 8079 - DNA, 25 bp, Homo sapiens
actgagaacctgaagcaccagccgg

SEQ ID NO: 8080 - DNA, 25 bp, Homo sapiens
aggtggcagtggtccgtactccacc

SEQ ID NO: 8081 - DNA, 25 bp, Homo sapiens
agtcgccagtggtgtctggggacac

SEQ ID NO: 8082 - DNA, 25 bp, Homo sapiens
cggagatcgtgtacaagtcgccagt

SEQ ID NO: 8083 - DNA, 25 bp, Homo sapiens
gacctgagcaaggtgacctccaagt

SEQ ID NO: 8084 - DNA, 25 bp, Homo sapiens
gagtccagtcgaagattgggtccct

SEQ ID NO: 8085 - DNA, 25 bp, Homo sapiens
gcagcatcgacatggtagactcgcc

SEQ ID NO: 8086 - DNA, 25 bp, Homo sapiens
gctagctgacgaggtgtctgcctcc

SEQ ID NO: 8087 - DNA, 25 bp, Homo sapiens
ggctcattaggcaacatccatcata

SEQ ID NO: 8088 - DNA, 25 bp, Homo sapiens
gtccaagatcggctccactgagaac

SEQ ID NO: 8089 - DNA, 25 bp, Homo sapiens
tccctggacaatatcacccacgtcc

SEQ ID NO: 8090 - DNA, 25 bp, Homo sapiens
aaatccatctgcttattctaatgct

SEQ ID NO: 8091 - DNA, 25 bp, Homo sapiens
aactctgagaatacccactgccagc

SEQ ID NO: 8092 - DNA, 25 bp, Homo sapiens
agctagactccatctttccaataaa

SEQ ID NO: 8093 - DNA, 25 bp, Homo sapiens
agtctgtttgggggcatacttttca

SEQ ID NO: 8094 - DNA, 25 bp, Homo sapiens
atgagccctatgtagcactaggttt

SEQ ID NO: 8095 - DNA, 25 bp, Homo sapiens
cacttcctacacacagctatcaggg

SEQ ID NO: 8096 - DNA, 25 bp, Homo sapiens
caggaatacagcgacagacctatct

SEQ ID NO: 8097 - DNA, 25 bp, Homo sapiens
cattttcttaaggcacacttcctac

SEQ ID NO: 8098 - DNA, 25 bp, Homo sapiens
gacagggatttcaatcacctttctg

SEQ ID NO: 8099 - DNA, 25 bp, Homo sapiens
gctataaatgtcctgttctttttct

SEQ ID NO: 8100 - DNA, 25 bp, Homo sapiens
gctgacttacatgatcgttttccta

SEQ ID NO: 8101 - DNA, 25 bp, Homo sapiens
acaactaatcccaggtgattttatc

SEQ ID NO: 8102 - DNA, 25 bp, Homo sapiens
atcaattccagtgttaccatctcct

SEQ ID NO: 8103 - DNA, 25 bp, Homo sapiens
caacttcgttacttgagcttcagca

SEQ ID NO: 8104 - DNA, 25 bp, Homo sapiens
gagcttcagcaacttaagaacttct

SEQ ID NO: 8105 - DNA, 25 bp, Homo sapiens
gcaaggcttgatagcagaagtttgg

SEQ ID NO: 8106 - DNA, 25 bp, Homo sapiens
ggacagccatgactgtagcaaggct

SEQ ID NO: 8107 - DNA, 25 bp, Homo sapiens
gtaaatctttctggacagccatgac

SEQ ID NO: 8108 - DNA, 25 bp, Homo sapiens
gttaccatctcctgagttttggttt

SEQ ID NO: 8109 - DNA, 25 bp, Homo sapiens
tcccacccccacagaagattttaag

SEQ ID NO: 8110 - DNA, 25 bp, Homo sapiens
tgattgcattcaacttcgttacttg

SEQ ID NO: 8111 - DNA, 25 bp, Homo sapiens
ttaaagcccatggatcctttctcag

SEQ ID NO: 8112 - DNA, 25 bp, Homo sapiens
cccccatgacccgtctggaaattat

SEQ ID NO: 8113 - DNA, 25 bp, Homo sapiens
cccttcctagacacctggttgattg

SEQ ID NO: 8114 - DNA, 25 bp, Homo sapiens
cgcagatattctagcttcattgtaa

SEQ ID NO: 8115 - DNA, 25 bp, Homo sapiens
gaaataagccctgctgctttctaga

SEQ ID NO: 8116 - DNA, 25 bp, Homo sapiens
gaagtagccctagggatcctttttg

SEQ ID NO: 8117 - DNA, 25 bp, Homo sapiens
gacacctggttgattgtcctgatcc

SEQ ID NO: 8118 - DNA, 25 bp, Homo sapiens
gatcctttttgaaactctacagtta

SEQ ID NO: 8119 - DNA, 25 bp, Homo sapiens
gttggcagttgttatctacagaatc

SEQ ID NO: 8120 - DNA, 25 bp, Homo sapiens
tagcattctaccaccatgtgtctca

SEQ ID NO: 8121 - DNA, 25 bp, Homo sapiens
tgtctcacccatttctaatttcatt

SEQ ID NO: 8122 - DNA, 25 bp, Homo sapiens
ttagagtttaccttcatatgtttga

SEQ ID NO: 8123 - DNA, 25 bp, Homo sapiens
aaatactcagctttcaatgtatcaa

SEQ ID NO: 8124 - DNA, 25 bp, Homo sapiens
agtgctagattctgttattttcttc

SEQ ID NO: 8125 - DNA, 25 bp, Homo sapiens
atgaagtaccccaacctgtttacat

SEQ ID NO: 8126 - DNA, 25 bp, Homo sapiens
cacctgctagccacgtgggatgttt

SEQ ID NO: 8127 - DNA, 25 bp, Homo sapiens
ctgatggttctttctctgatgagat

SEQ ID NO: 8128 - DNA, 25 bp, Homo sapiens
gaacaccattcttgataatcttgcc

SEQ ID NO: 8129 - DNA, 25 bp, Homo sapiens
gaagaactggtagccacagtggtga

SEQ ID NO: 8130 - DNA, 25 bp, Homo sapiens
gaggtgtattctgaggccacattgc

SEQ ID NO: 8131 - DNA, 25 bp, Homo sapiens
tattccgatctgacatatctgcatt

SEQ ID NO: 8132 - DNA, 25 bp, Homo sapiens
tgaggccacattgctttgcatgcca

SEQ ID NO: 8133 - DNA, 25 bp, Homo sapiens
ttgataatcttgccgccagggactt

SEQ ID NO: 8134 - DNA, 25 bp, Homo sapiens
aaactctctgcagaacagtcaccac

SEQ ID NO: 8135 - DNA, 25 bp, Homo sapiens
aattatttctctcacacttttgctt

SEQ ID NO: 8136 - DNA, 25 bp, Homo sapiens
ccaatgctccacctgcttatgagaa

SEQ ID NO: 8137 - DNA, 25 bp, Homo sapiens
ccaccaccttattcaccttaagagc

SEQ ID NO: 8138 - DNA, 25 bp, Homo sapiens
ccactcttacaccacggctgaagag

SEQ ID NO: 8139 - DNA, 25 bp, Homo sapiens
gaagaggccgctgggatcggcatcc

SEQ ID NO: 8140 - DNA, 25 bp, Homo sapiens
gaagggtttgatcatcgggacagca

SEQ ID NO: 8141 - DNA, 25 bp, Homo sapiens
gtaggtccgctagcagtactaatca

SEQ ID NO: 8142 - DNA, 25 bp, Homo sapiens
tactgctcatcggctgttggtattg

SEQ ID NO: 8143 - DNA, 25 bp, Homo sapiens
tgatcctgggagtcttactgctcat

SEQ ID NO: 8144 - DNA, 25 bp, Homo sapiens
tgctcacttcatctatggttacccc

SEQ ID NO: 8145 - DNA, 25 bp, Homo sapiens
agcccttcccaggctggatactaag

SEQ ID NO: 8146 - DNA, 25 bp, Homo sapiens
catagcactgggctctgatggctgc

SEQ ID NO: 8147 - DNA, 25 bp, Homo sapiens
cgtgggcatctcaagccccaaatgg

SEQ ID NO: 8148 - DNA, 25 bp, Homo sapiens
ctacctgcccccatcataagggcac

SEQ ID NO: 8149 - DNA, 25 bp, Homo sapiens
ctcctcctccatacgttcagaggtg

SEQ ID NO: 8150 - DNA, 25 bp, Homo sapiens
gaatcacagccctcatgatcattct

SEQ ID NO: 8151 - DNA, 25 bp, Homo sapiens
gagctcacagctggacaggtgttgt

SEQ ID NO: 8152 - DNA, 25 bp, Homo sapiens
ggaggaacgtggtcaactcacacct

SEQ ID NO: 8153 - DNA, 25 bp, Homo sapiens
ggctgctccactgggttacagaatc

SEQ ID NO: 8154 - DNA, 25 bp, Homo sapiens
gggaccacactgatcctggagaaaa

SEQ ID NO: 8155 - DNA, 25 bp, Homo sapiens
gggcctagacaaggctccaggcccc

SEQ ID NO: 8156 - DNA, 25 bp, Homo sapiens
aaatttagttgttctccccaatgtg

SEQ ID NO: 8157 - DNA, 25 bp, Homo sapiens
aagtgacaattgtagagtcctcaat

SEQ ID NO: 8158 - DNA, 25 bp, Homo sapiens
aataagaatcatttgctttgagttt

SEQ ID NO: 8159 - DNA, 25 bp, Homo sapiens
acagctagtgcttgggatcgtacat

SEQ ID NO: 8160 - DNA, 25 bp, Homo sapiens
gaaaatacatatgcagtctagtcag

SEQ ID NO: 8161 - DNA, 25 bp, Homo sapiens
gcatcttgctagacctagatgagtc

SEQ ID NO: 8162 - DNA, 25 bp, Homo sapiens
gcatttccaaagtagcatcttgcta

SEQ ID NO: 8163 - DNA, 25 bp, Homo sapiens
ggaaaaccatggattctgaaagtta

SEQ ID NO: 8164 - DNA, 25 bp, Homo sapiens
gtattttaatttggatggcagtctc

SEQ ID NO: 8165 - DNA, 25 bp, Homo sapiens
gtgcttgggatcgtacatgttaatt

SEQ ID NO: 8166 - DNA, 25 bp, Homo sapiens
tgttctccccaatgtgtattttaat

SEQ ID NO: 8167 - DNA, 25 bp, Homo sapiens
aaataaaccattcttactgctctct

SEQ ID NO: 8168 - DNA, 25 bp, Homo sapiens
agatcatgtatcacttgcaagtttt

SEQ ID NO: 8169 - DNA, 25 bp, Homo sapiens
atctcagcaaaactccacaagcata

SEQ ID NO: 8170 - DNA, 25 bp, Homo sapiens
atggaaaccctattaatctcagcaa

SEQ ID NO: 8171 - DNA, 25 bp, Homo sapiens
atttcacacatgttcttatagatca

SEQ ID NO: 8172 - DNA, 25 bp, Homo sapiens
caagcatacatgtgtctacctcgtc

SEQ ID NO: 8173 - DNA, 25 bp, Homo sapiens
gcatgatactttgagattgtgttct

SEQ ID NO: 8174 - DNA, 25 bp, Homo sapiens
ggacattcgattggatggaaaccct

SEQ ID NO: 8175 - DNA, 25 bp, Homo sapiens
ggagccttgtctaatttcagataat

SEQ ID NO: 8176 - DNA, 25 bp, Homo sapiens
ggagttcatatcctatatcatttca

SEQ ID NO: 8177 - DNA, 25 bp, Homo sapiens
taaggcatgtttattcccctaatcc

SEQ ID NO: 8178 - DNA, 25 bp, Homo sapiens
aagggaacgacattgccctgctcaa

SEQ ID NO: 8179 - DNA, 25 bp, Homo sapiens
aagtccctgggactgtttcagactt

SEQ ID NO: 8180 - DNA, 25 bp, Homo sapiens
ccggttgctggttgtggactatgcc

SEQ ID NO: 8181 - DNA, 25 bp, Homo sapiens
ctggttgtggactatgccacctgct

SEQ ID NO: 8182 - DNA, 25 bp, Homo sapiens
gactggatcaattcggtgattgcaa

SEQ ID NO: 8183 - DNA, 25 bp, Homo sapiens
ggactgtttcagacttggaaaggtc

SEQ ID NO: 8184 - DNA, 25 bp, Homo sapiens
gtcagtgtctctaagattgtggtgc

SEQ ID NO: 8185 - DNA, 25 bp, Homo sapiens
gtgcacaaggactggaactccaacc

SEQ ID NO: 8186 - DNA, 25 bp, Homo sapiens
gtggtgcacaaggactggaactcca

SEQ ID NO: 8187 - DNA, 25 bp, Homo sapiens
tccctgggactgtttcagacttgga

SEQ ID NO: 8188 - DNA, 25 bp, Homo sapiens
ttcagacttggaaaggtcacagaag

SEQ ID NO: 8189 - DNA, 25 bp, Homo sapiens
agcagcgtgaaaaccagtatgatct

SEQ ID NO: 8190 - DNA, 25 bp, Homo sapiens
atctccagctgcaacggagactctg

SEQ ID NO: 8191 - DNA, 25 bp, Homo sapiens
ccagctgcaacggagactctggcgg

SEQ ID NO: 8192 - DNA, 25 bp, Homo sapiens
cgggtctccaattacatcgactgga

SEQ ID NO: 8193 - DNA, 25 bp, Homo sapiens
ctggtggggcagcagcgtgaaaacc

SEQ ID NO: 8194 - DNA, 25 bp, Homo sapiens
gccactgaactgtcaggcgtctgac

SEQ ID NO: 8195 - DNA, 25 bp, Homo sapiens
gggcagcagcgtgaaaaccagtatg

SEQ ID NO: 8196 - DNA, 25 bp, Homo sapiens
ggtctccaattacatcgactggatc

SEQ ID NO: 8197 - DNA, 25 bp, Homo sapiens
ggtggggcagcagcgtgaaaaccag

SEQ ID NO: 8198 - DNA, 25 bp, Homo sapiens
gtgaaaaccagtatgatctgtgctg

SEQ ID NO: 8199 - DNA, 25 bp, Homo sapiens
tcggctgcaactactaccacaagcc

SEQ ID NO: 8200 - DNA, 25 bp, Homo sapiens
aactctgtgtctttacatatttgtt

SEQ ID NO: 8201 - DNA, 25 bp, Homo sapiens
agcctcacttttcaacagagtcatc

SEQ ID NO: 8202 - DNA, 25 bp, Homo sapiens
atggccacagcctaaagtacacacg

SEQ ID NO: 8203 - DNA, 25 bp, Homo sapiens
caggaggaggcagtcatcctctcct

SEQ ID NO: 8204 - DNA, 25 bp, Homo sapiens
ctctgatttcttcgcaagtctctta

SEQ ID NO: 8205 - DNA, 25 bp, Homo sapiens
gatttaaacctgtccacattggtgg

SEQ ID NO: 8206 - DNA, 25 bp, Homo sapiens
ggagagtactcactttaccatcttt

SEQ ID NO: 8207 - DNA, 25 bp, Homo sapiens
ggagggttggcttcccaaaagcata

SEQ ID NO: 8208 - DNA, 25 bp, Homo sapiens
ggcaccagcaatgctgtcattcagt

SEQ ID NO: 8209 - DNA, 25 bp, Homo sapiens
gtaacacatccctaattttaccagg

SEQ ID NO: 8210 - DNA, 25 bp, Homo sapiens
gtacacacggctgtgacttgattca

SEQ ID NO: 8211 - DNA, 25 bp, Homo sapiens
agaacattgcggtggcaggctactc

SEQ ID NO: 8212 - DNA, 25 bp, Homo sapiens
atttgggggcttactcatgctaggc

SEQ ID NO: 8213 - DNA, 25 bp, Homo sapiens
caggaggggtgctgtcatcctggtc

SEQ ID NO: 8214 - DNA, 25 bp, Homo sapiens
cagttgctgccctacatggagaaca

SEQ ID NO: 8215 - DNA, 25 bp, Homo sapiens
ctactccactcggctctgagaggag

SEQ ID NO: 8216 - DNA, 25 bp, Homo sapiens
gactgtgcaggaatcgtgtccttcc

SEQ ID NO: 8217 - DNA, 25 bp, Homo sapiens
gagggggtgtctaggtgatcatttg

SEQ ID NO: 8218 - DNA, 25 bp, Homo sapiens
ggacatccgggtaaactgcgtggtt

SEQ ID NO: 8219 - DNA, 25 bp, Homo sapiens
ggcgctgggtgtctacaatgtcagc

SEQ ID NO: 8220 - DNA, 25 bp, Homo sapiens
gtctcttccattgcagcttataatc

SEQ ID NO: 8221 - DNA, 25 bp, Homo sapiens
tgctgggtctcactagaacactggc

SEQ ID NO: 8222 - DNA, 25 bp, Homo sapiens
aaatcatatgacctccaatgtgact

SEQ ID NO: 8223 - DNA, 25 bp, Homo sapiens
aacgggtgcagagtctcagtttgag

SEQ ID NO: 8224 - DNA, 25 bp, Homo sapiens
atatatttaattctctttatctttc

SEQ ID NO: 8225 - DNA, 25 bp, Homo sapiens
atgtaattcaggcacctctctactg

SEQ ID NO: 8226 - DNA, 25 bp, Homo sapiens
ctccaatgtgactatcaggctgtta

SEQ ID NO: 8227 - DNA, 25 bp, Homo sapiens
gaagcagaatggcaggtgtcagagg

SEQ ID NO: 8228 - DNA, 25 bp, Homo sapiens
gactgatggtgatggttacattaca

SEQ ID NO: 8229 - DNA, 25 bp, Homo sapiens
gggaccaactttgaagatattacgc

SEQ ID NO: 8230 - DNA, 25 bp, Homo sapiens
taaaagggcccactatgtaattcag

SEQ ID NO: 8231 - DNA, 25 bp, Homo sapiens
ttcttgtattttggccacacgatat

SEQ ID NO: 8232 - DNA, 25 bp, Homo sapiens
tttcctgcatacagaccccaatata

SEQ ID NO: 8233 - DNA, 25 bp, Homo sapiens
caaattggccgttagccacctgggt

SEQ ID NO: 8234 - DNA, 25 bp, Homo sapiens
cagcaacatgcagagtccctgagcc

SEQ ID NO: 8235 - DNA, 25 bp, Homo sapiens
ccccttcaccttgtgtggacagtgt

SEQ ID NO: 8236 - DNA, 25 bp, Homo sapiens
gaatttgctccggccaaattggccg

SEQ ID NO: 8237 - DNA, 25 bp, Homo sapiens
gagaacaaacttgggcagccggaac

SEQ ID NO: 8238 - DNA, 25 bp, Homo sapiens
gagcttcagacagggggtgggcttt

SEQ ID NO: 8239 - DNA, 25 bp, Homo sapiens
ggaatatgaccctaccagaggttgg

SEQ ID NO: 8240 - DNA, 25 bp, Homo sapiens
ggtccacatcctgctaagacgttta

SEQ ID NO: 8241 - DNA, 25 bp, Homo sapiens
ggtgggctttgcctaaggacacaca

SEQ ID NO: 8242 - DNA, 25 bp, Homo sapiens
tcgaggagccctttgaactttccaa

SEQ ID NO: 8243 - DNA, 25 bp, Homo sapiens
tggggccagatgagccagcattcca

SEQ ID NO: 8244 - DNA, 25 bp, Homo sapiens
aaagcccaacatcccatggctgttt

SEQ ID NO: 8245 - DNA, 25 bp, Homo sapiens
gaaacccatgcagacacgagtggtc

SEQ ID NO: 8246 - DNA, 25 bp, Homo sapiens
gacaatacccagacaggggctttgc

SEQ ID NO: 8247 - DNA, 25 bp, Homo sapiens
gctctttgcaattcctattctgtta

SEQ ID NO: 8248 - DNA, 25 bp, Homo sapiens
gtgggaccggtcgttgaaacccatg

SEQ ID NO: 8249 - DNA, 25 bp, Homo sapiens
gtggtcgggagacttcagaagcctt

SEQ ID NO: 8250 - DNA, 25 bp, Homo sapiens
gttttccttgtgttgacctaatcat

SEQ ID NO: 8251 - DNA, 25 bp, Homo sapiens
tattctgttaatcgctgttttcctt

SEQ ID NO: 8252 - DNA, 25 bp, Homo sapiens
tggctgtttctcacagatcccaaat

SEQ ID NO: 8253 - DNA, 25 bp, Homo sapiens
ttgtagtccctaccagtttaggctg

SEQ ID NO: 8254 - DNA, 25 bp, Homo sapiens
tttccattggctgaagctctttgca

SEQ ID NO: 8255 - DNA, 25 bp, Homo sapiens
aagagttttctttagtatagccaca

SEQ ID NO: 8256 - DNA, 25 bp, Homo sapiens
aggtaggactatcagttccctctaa

SEQ ID NO: 8257 - DNA, 25 bp, Homo sapiens
atcagttccctctaaatgtatatgt

SEQ ID NO: 8258 - DNA, 25 bp, Homo sapiens
atcatttattctgcttcgagggtcc

SEQ ID NO: 8259 - DNA, 25 bp, Homo sapiens
atgcaatctcttttctacatacatt

SEQ ID NO: 8260 - DNA, 25 bp, Homo sapiens
atgccttgaactgttgtctgggatt

SEQ ID NO: 8261 - DNA, 25 bp, Homo sapiens
ctcttgacattccactgtgcgtttt

SEQ ID NO: 8262 - DNA, 25 bp, Homo sapiens
gacaacctatcatttattctgcttc

SEQ ID NO: 8263 - DNA, 25 bp, Homo sapiens
gtacaaccgacagctcttactttta

SEQ ID NO: 8264 - DNA, 25 bp, Homo sapiens
gtatagccacaaatgccttgaactg

SEQ ID NO: 8265 - DNA, 25 bp, Homo sapiens
gttttaacttttatacctatctgag

SEQ ID NO: 8266 - DNA, 25 bp, Homo sapiens
aatggtaatttgcctcagtcatttt

SEQ ID NO: 8267 - DNA, 25 bp, Homo sapiens
atttgcagtacttgatttaggatct

SEQ ID NO: 8268 - DNA, 25 bp, Homo sapiens
cacgtcttgtcatatttcatctgta

SEQ ID NO: 8269 - DNA, 25 bp, Homo sapiens
gaattataattcacgtcttgtcata

SEQ ID NO: 8270 - DNA, 25 bp, Homo sapiens
gatttaggatctgtggtgcagggca

SEQ ID NO: 8271 - DNA, 25 bp, Homo sapiens
gatttcccatgccataatttttctg

SEQ ID NO: 8272 - DNA, 25 bp, Homo sapiens
ggtgcagggcatgtttcaaagttta

SEQ ID NO: 8273 - DNA, 25 bp, Homo sapiens
gtgtgtgtgggttctaatggtaatt

SEQ ID NO: 8274 - DNA, 25 bp, Homo sapiens
gttttgtgatttgaactcctaggaa

SEQ ID NO: 8275 - DNA, 25 bp, Homo sapiens
tagtcacagcttaaaaacattcagt

SEQ ID NO: 8276 - DNA, 25 bp, Homo sapiens
ttcatctgtataccttcaaattctc

SEQ ID NO: 8277 - DNA, 25 bp, Homo sapiens
aaaacttacctcattagcagcatcc

SEQ ID NO: 8278 - DNA, 25 bp, Homo sapiens
ataagtatactgcctgcctatgtga

SEQ ID NO: 8279 - DNA, 25 bp, Homo sapiens
attcgggaattaggcatctgccctg

SEQ ID NO: 8280 - DNA, 25 bp, Homo sapiens
attgcagccgtcgttgatgttattc

SEQ ID NO: 8281 - DNA, 25 bp, Homo sapiens
cagcatccctctacaaggtgcattt

SEQ ID NO: 8282 - DNA, 25 bp, Homo sapiens
gacattcccaagtcagtacgtccaa

SEQ ID NO: 8283 - DNA, 25 bp, Homo sapiens
gacgacaatccaaaaaccttctact

SEQ ID NO: 8284 - DNA, 25 bp, Homo sapiens
gccctgatgatgctgctgtaatccc

SEQ ID NO: 8285 - DNA, 25 bp, Homo sapiens
gggggccaacaaagctcaggacaac

SEQ ID NO: 8286 - DNA, 25 bp, Homo sapiens
gtttgccacacccaggtgatttcct

SEQ ID NO: 8287 - DNA, 25 bp, Homo sapiens
taatggaagccctgtctgtttgcca

SEQ ID NO: 8288 - DNA, 25 bp, Homo sapiens
aatttttggctattctgcttctttt

SEQ ID NO: 8289 - DNA, 25 bp, Homo sapiens
atcatcagtgtgtctatttctacaa

SEQ ID NO: 8290 - DNA, 25 bp, Homo sapiens
atgggaatccttcaactacattttt

SEQ ID NO: 8291 - DNA, 25 bp, Homo sapiens
cactgccctagtcactgttgcatta

SEQ ID NO: 8292 - DNA, 25 bp, Homo sapiens
ccatgttggaccaataccacactgc

SEQ ID NO: 8293 - DNA, 25 bp, Homo sapiens
gaaagagctagattctctctctcaa

SEQ ID NO: 8294 - DNA, 25 bp, Homo sapiens
gcccttgcaggtttgtagaaactca

SEQ ID NO: 8295 - DNA, 25 bp, Homo sapiens
ggattttctatctattccatgttgg

SEQ ID NO: 8296 - DNA, 25 bp, Homo sapiens
gtagttttcaccatgacagtcttgc

SEQ ID NO: 8297 - DNA, 25 bp, Homo sapiens
tagtatacccctgtatttatttgtt

SEQ ID NO: 8298 - DNA, 25 bp, Homo sapiens
tcaccatgacagtcttgcacatatt

SEQ ID NO: 8299 - DNA, 25 bp, Homo sapiens
cagctcctggttcgagtgatcgtgt

SEQ ID NO: 8300 - DNA, 25 bp, Homo sapiens
catgcccacgaagctgtcggcagtg

SEQ ID NO: 8301 - DNA, 25 bp, Homo sapiens
ctccatctgagtcccctgggagaga

SEQ ID NO: 8302 - DNA, 25 bp, Homo sapiens
gaacacataatccccgtggtggtca

SEQ ID NO: 8303 - DNA, 25 bp, Homo sapiens
gaagaaggacccggatcaaccagca

SEQ ID NO: 8304 - DNA, 25 bp, Homo sapiens
gaaggcgactgtctgaatggcccag

SEQ ID NO: 8305 - DNA, 25 bp, Homo sapiens
gcagtgcatgcgcaaggtgggccgc

SEQ ID NO: 8306 - DNA, 25 bp, Homo sapiens
ggacaccaactttatggactgccca

SEQ ID NO: 8307 - DNA, 25 bp, Homo sapiens
ggcccaggcagctctagctgggagc

SEQ ID NO: 8308 - DNA, 25 bp, Homo sapiens
tgatcgtgtgtcgctgcaacgtgga

SEQ ID NO: 8309 - DNA, 25 bp, Homo sapiens
ttttcacccactggaccatgtcaag

SEQ ID NO: 8310 - DNA, 25 bp, Homo sapiens
aatcacttgaggttctggttgcaga

SEQ ID NO: 8311 - DNA, 25 bp, Homo sapiens
atgataccatcttccaaaatcctat

SEQ ID NO: 8312 - DNA, 25 bp, Homo sapiens
atgttgttcttattaccctgattga

SEQ ID NO: 8313 - DNA, 25 bp, Homo sapiens
gaagagcagctaaggcgcctgcaag

SEQ ID NO: 8314 - DNA, 25 bp, Homo sapiens
gagaaaacaccatcactaactagaa

SEQ ID NO: 8315 - DNA, 25 bp, Homo sapiens
gaggagtgtctggtaagaactactg

SEQ ID NO: 8316 - DNA, 25 bp, Homo sapiens
ggttgcagatctagtgaatgctcag

SEQ ID NO: 8317 - DNA, 25 bp, Homo sapiens
gttccttgtggacatctagtcactt

SEQ ID NO: 8318 - DNA, 25 bp, Homo sapiens
gttgacaagtgtcccatgtgctaca

SEQ ID NO: 8319 - DNA, 25 bp, Homo sapiens
tattgctatcgtttttgttccttgt

SEQ ID NO: 8320 - DNA, 25 bp, Homo sapiens
tgtgctacacagtcattactttcaa

SEQ ID NO: 8321 - DNA, 25 bp, Homo sapiens
aaacctgtcaatgatacagtcccta

SEQ ID NO: 8322 - DNA, 25 bp, Homo sapiens
aactcctgacagtcttgtgcttttc

SEQ ID NO: 8323 - DNA, 25 bp, Homo sapiens
aatgtcttcatttcattgtatgatg

SEQ ID NO: 8324 - DNA, 25 bp, Homo sapiens
aattccaatatgatgactcccttaa

SEQ ID NO: 8325 - DNA, 25 bp, Homo sapiens
cactgtatttgtatctctgaagcat

SEQ ID NO: 8326 - DNA, 25 bp, Homo sapiens
catgtttcatgttttgtgactatat

SEQ ID NO: 8327 - DNA, 25 bp, Homo sapiens
gaagcagttgtgtcagctactgcgg

SEQ ID NO: 8328 - DNA, 25 bp, Homo sapiens
gagattttggtattacactgtattt

SEQ ID NO: 8329 - DNA, 25 bp, Homo sapiens
ggttatttctcaacaaagcacagtg

SEQ ID NO: 8330 - DNA, 25 bp, Homo sapiens
gtttcaatgtgattctaatgtcttc

SEQ ID NO: 8331 - DNA, 25 bp, Homo sapiens
ttcagcttcatttgtgtcaatgggc

SEQ ID NO: 8332 - DNA, 25 bp, Homo sapiens
ccaagctgaagggccgtgggcggct

SEQ ID NO: 8333 - DNA, 25 bp, Homo sapiens
ccaagtggtgtatgtcttctccaag

SEQ ID NO: 8334 - DNA, 25 bp, Homo sapiens
cccaagctggctgaccggaagctgt

SEQ ID NO: 8335 - DNA, 25 bp, Homo sapiens
gaagctgtgtgcggaccaggagtgc

SEQ ID NO: 8336 - DNA, 25 bp, Homo sapiens
gaccattcaccggggccaagtggtg

SEQ ID NO: 8337 - DNA, 25 bp, Homo sapiens
ggaccagaccctgaaacctggcaaa

SEQ ID NO: 8338 - DNA, 25 bp, Homo sapiens
gggaggcagcgttcagggagattac

SEQ ID NO: 8339 - DNA, 25 bp, Homo sapiens
gggatttctactgccagtgagctca

SEQ ID NO: 8340 - DNA, 25 bp, Homo sapiens
tactatggagatctggctgctcgcc

SEQ ID NO: 8341 - DNA, 25 bp, Homo sapiens
tggtgtcaggggtggtcctatgccc

SEQ ID NO: 8342 - DNA, 25 bp, Homo sapiens
ttccccagtagcattgtccgagagg

SEQ ID NO: 8343 - DNA, 25 bp, Homo sapiens
aaaaaccgcagcccaggttctgatc

SEQ ID NO: 8344 - DNA, 25 bp, Homo sapiens
acaggagattctctttcttcgctga

SEQ ID NO: 8345 - DNA, 25 bp, Homo sapiens
actggagggcctgtaacgtgttgca

SEQ ID NO: 8346 - DNA, 25 bp, Homo sapiens
cagaggaatgtgattgtcatcccca

SEQ ID NO: 8347 - DNA, 25 bp, Homo sapiens
gacgagaatcgaggtgctgttttag

SEQ ID NO: 8348 - DNA, 25 bp, Homo sapiens
gcaaccatactcagcttcaacagaa

SEQ ID NO: 8349 - DNA, 25 bp, Homo sapiens
gcatcagaaactctgccaacactga

SEQ ID NO: 8350 - DNA, 25 bp, Homo sapiens
gtgacaccagcacgcattgttgaga

SEQ ID NO: 8351 - DNA, 25 bp, Homo sapiens
gttctgatccgtttccatatccaga

SEQ ID NO: 8352 - DNA, 25 bp, Homo sapiens
taacgtgttgcaatcctctcatttg

SEQ ID NO: 8353 - DNA, 25 bp, Homo sapiens
ttccctgctggaggatcccaagatt

SEQ ID NO: 8354 - DNA, 25 bp, Homo sapiens
aggacaggcttcatgcctgcatcct

SEQ ID NO: 8355 - DNA, 25 bp, Homo sapiens
cactctcttcttacttaaaccagtc

SEQ ID NO: 8356 - DNA, 25 bp, Homo sapiens
cccacctgcacacagtctgttggat

SEQ ID NO: 8357 - DNA, 25 bp, Homo sapiens
gacccctttttgctgatgagtgttg

SEQ ID NO: 8358 - DNA, 25 bp, Homo sapiens
gatctagacctctctgattgctgat

SEQ ID NO: 8359 - DNA, 25 bp, Homo sapiens
gccactgaggaccgaggactatgct

SEQ ID NO: 8360 - DNA, 25 bp, Homo sapiens
gggactgactcctggaagacagcct

SEQ ID NO: 8361 - DNA, 25 bp, Homo sapiens
gtcagaaatcagttcactccctgga

SEQ ID NO: 8362 - DNA, 25 bp, Homo sapiens
tcttctctctgcctaattgtcaagg

SEQ ID NO: 8363 - DNA, 25 bp, Homo sapiens
tgaggcctcttcccaatttaaacaa

SEQ ID NO: 8364 - DNA, 25 bp, Homo sapiens
ttaaaccagtcccagacacctagac

SEQ ID NO: 8365 - DNA, 25 bp, Homo sapiens
aactcactaagtttacttctcgaat

SEQ ID NO: 8366 - DNA, 25 bp, Homo sapiens
actagtggcaaatgaccttccaagt

SEQ ID NO: 8367 - DNA, 25 bp, Homo sapiens
gatttacataggccgagctgtggac

SEQ ID NO: 8368 - DNA, 25 bp, Homo sapiens
gcaagtgaggcctgacatggttgtc

SEQ ID NO: 8369 - DNA, 25 bp, Homo sapiens
gcctgagcctgaaccttaatgtggg

SEQ ID NO: 8370 - DNA, 25 bp, Homo sapiens
ggagtcaaggattcttctgattcta

SEQ ID NO: 8371 - DNA, 25 bp, Homo sapiens
ggggcctcagttaatatccctgtgg

SEQ ID NO: 8372 - DNA, 25 bp, Homo sapiens
ggtaaactagcaatgcctgagcctg

SEQ ID NO: 8373 - DNA, 25 bp, Homo sapiens
ggttgaggaatatcacactcgtctt

SEQ ID NO: 8374 - DNA, 25 bp, Homo sapiens
gtcttgacgaatattgcttactggt

SEQ ID NO: 8375 - DNA, 25 bp, Homo sapiens
ttcattcgtatccagctctttatta

SEQ ID NO: 8376 - DNA, 25 bp, Homo sapiens
aaaccttatacctagctcctggagg

SEQ ID NO: 8377 - DNA, 25 bp, Homo sapiens
agccatctcaagcaactttcgacgt

SEQ ID NO: 8378 - DNA, 25 bp, Homo sapiens
atggccatggctcagaaaccttata

SEQ ID NO: 8379 - DNA, 25 bp, Homo sapiens
attttcgacgtttgactagccatct

SEQ ID NO: 8380 - DNA, 25 bp, Homo sapiens
ccacctgtagagaagcttttgccgc

SEQ ID NO: 8381 - DNA, 25 bp, Homo sapiens
cctattccttggttctgtcagagaa

SEQ ID NO: 8382 - DNA, 25 bp, Homo sapiens
gattttatcattctgcttccgtatt

SEQ ID NO: 8383 - DNA, 25 bp, Homo sapiens
gccgctgtctctaaaatagcttggc

SEQ ID NO: 8384 - DNA, 25 bp, Homo sapiens
ggaatgtttaatgcccctgatttta

SEQ ID NO: 8385 - DNA, 25 bp, Homo sapiens
tcatctcacgctgatcattggatcc

SEQ ID NO: 8386 - DNA, 25 bp, Homo sapiens
tttcgacgtttgactagccatctca

SEQ ID NO: 8387 - DNA, 25 bp, Homo sapiens
agaccacgtgggacagaactcctgc

SEQ ID NO: 8388 - DNA, 25 bp, Homo sapiens
cacgggcctgcaaactcgacaggac

SEQ ID NO: 8389 - DNA, 25 bp, Homo sapiens
caggcccagaccacgtgggacagaa

SEQ ID NO: 8390 - DNA, 25 bp, Homo sapiens
caggcttgggaggaccatggggcac

SEQ ID NO: 8391 - DNA, 25 bp, Homo sapiens
ccggaaccgacgagtcctgaggaga

SEQ ID NO: 8392 - DNA, 25 bp, Homo sapiens
cgggcctgcaaactcgacaggaccc

SEQ ID NO: 8393 - DNA, 25 bp, Homo sapiens
gaaccggtgcgtcctgaggagagaa

SEQ ID NO: 8394 - DNA, 25 bp, Homo sapiens
gagtcctgaggagagaaccggtgcg

SEQ ID NO: 8395 - DNA, 25 bp, Homo sapiens
tcctgaggagagaaccggcgctggg

SEQ ID NO: 8396 - DNA, 25 bp, Homo sapiens
tgaggagagaaccggtgcgtcctga

SEQ ID NO: 8397 - DNA, 25 bp, Homo sapiens
ttgggaggaccatggggcacaatgc

SEQ ID NO: 8398 - DNA, 25 bp, Homo sapiens
ccctcccaacagcgctttaaaagcg

SEQ ID NO: 8399 - DNA, 25 bp, Homo sapiens
ccctggggctgtatttatctctgag

SEQ ID NO: 8400 - DNA, 25 bp, Homo sapiens
gatgcaccggttatttgggggggcg

SEQ ID NO: 8401 - DNA, 25 bp, Homo sapiens
gcaaggacacagcgcggttttttcc

SEQ ID NO: 8402 - DNA, 25 bp, Homo sapiens
ggtgtgtggtgctacagggaatttg

SEQ ID NO: 8403 - DNA, 25 bp, Homo sapiens
gttcaggaccactttttgtaatact

SEQ ID NO: 8404 - DNA, 25 bp, Homo sapiens
tccctcgcgcccaaaagattgaact

SEQ ID NO: 8405 - DNA, 25 bp, Homo sapiens
tgcactccggtcccaaatgtagcag

SEQ ID NO: 8406 - DNA, 25 bp, Homo sapiens
tgtagcaggtgtaaccgtaacccac

SEQ ID NO: 8407 - DNA, 25 bp, Homo sapiens
ttcctcggtgggccagagctgaacc

SEQ ID NO: 8408 - DNA, 25 bp, Homo sapiens
tttgtacgtttataccgcaggcggg

SEQ ID NO: 8409 - DNA, 25 bp, Homo sapiens
agtgagtgcatggtgctttgtccca

SEQ ID NO: 8410 - DNA, 25 bp, Homo sapiens
caccatggccagaaacgtgcctgct

SEQ ID NO: 8411 - DNA, 25 bp, Homo sapiens
ctccttcatgggcaagcgctacatg

SEQ ID NO: 8412 - DNA, 25 bp, Homo sapiens
gagtgctcatgggatctggttgttt

SEQ ID NO: 8413 - DNA, 25 bp, Homo sapiens
gcatctgtaagttgcactcaggagg

SEQ ID NO: 8414 - DNA, 25 bp, Homo sapiens
ggatctggttgtttagaagcatgca

SEQ ID NO: 8415 - DNA, 25 bp, Homo sapiens
ggcgccgggagtgagtgcatggtgc

SEQ ID NO: 8416 - DNA, 25 bp, Homo sapiens
gttgcactcaggagggtttagggga

SEQ ID NO: 8417 - DNA, 25 bp, Homo sapiens
tccctctccaagcatctgtaagttg

SEQ ID NO: 8418 - DNA, 25 bp, Homo sapiens
ttaggggagggccatgggcaggctg

SEQ ID NO: 8419 - DNA, 25 bp, Homo sapiens
ttcatgggcaagcgctacatgaccc

SEQ ID NO: 8420 - DNA, 25 bp, Homo sapiens
aacaccaggatttaagtttcacagc

SEQ ID NO: 8421 - DNA, 25 bp, Homo sapiens
aattacttcttagtatgtgcattta

SEQ ID NO: 8422 - DNA, 25 bp, Homo sapiens
attacgtattgatctgaccacacac

SEQ ID NO: 8423 - DNA, 25 bp, Homo sapiens
cacttggttcttgtactctacaaaa

SEQ ID NO: 8424 - DNA, 25 bp, Homo sapiens
ctgaccacacacaatgttactctag

SEQ ID NO: 8425 - DNA, 25 bp, Homo sapiens
gaagacactaccaacatgatattac

SEQ ID NO: 8426 - DNA, 25 bp, Homo sapiens
gaatagccctatttatccttgttaa

SEQ ID NO: 8427 - DNA, 25 bp, Homo sapiens
ggtcatgaagatcaccatcaatttt

SEQ ID NO: 8428 - DNA, 25 bp, Homo sapiens
gtaatgtgacttggattcaatttta

SEQ ID NO: 8429 - DNA, 25 bp, Homo sapiens
tcacagcacttacaattttccctct

SEQ ID NO: 8430 - DNA, 25 bp, Homo sapiens
ttatccttgttaagtatcagctaca

SEQ ID NO: 8431 - DNA, 25 bp, Homo sapiens
aaaaatctttgttgtccatccctat

SEQ ID NO: 8432 - DNA, 25 bp, Homo sapiens
aaagttgtgtcttatgccaagcgga

SEQ ID NO: 8433 - DNA, 25 bp, Homo sapiens
aatcctagaccttttcatgacgtgt

SEQ ID NO: 8434 - DNA, 25 bp, Homo sapiens
acctccctattctgttatttcttag

SEQ ID NO: 8435 - DNA, 25 bp, Homo sapiens
atatcacttttcactttatcaactg

SEQ ID NO: 8436 - DNA, 25 bp, Homo sapiens
attatacggctacatttacacattt

SEQ ID NO: 8437 - DNA, 25 bp, Homo sapiens
gagactttggggcctgtaagcttga

SEQ ID NO: 8438 - DNA, 25 bp, Homo sapiens
gagcagagcagcgtcctataatcct

SEQ ID NO: 8439 - DNA, 25 bp, Homo sapiens
gattctgaggctaggctgagtactt

SEQ ID NO: 8440 - DNA, 25 bp, Homo sapiens
ggtgaccacaatagcaacacctccc

SEQ ID NO: 8441 - DNA, 25 bp, Homo sapiens
tcatcctctgattgccccaataaaa

SEQ ID NO: 8442 - DNA, 25 bp, Homo sapiens
aagggaagagctttcaccttctttg

SEQ ID NO: 8443 - DNA, 25 bp, Homo sapiens
acagtctcccggtgtcatgaatgga

SEQ ID NO: 8444 - DNA, 25 bp, Homo sapiens
cactccaattcacacaggcttggta

SEQ ID NO: 8445 - DNA, 25 bp, Homo sapiens
cttgaagtttgtgttcttccctctg

SEQ ID NO: 8446 - DNA, 25 bp, Homo sapiens
gaattgctcgaactcagggggtgga

SEQ ID NO: 8447 - DNA, 25 bp, Homo sapiens
gccaaaatgctgaaactccgtctct

SEQ ID NO: 8448 - DNA, 25 bp, Homo sapiens
gcccatcactcggagaggtgcacag

SEQ ID NO: 8449 - DNA, 25 bp, Homo sapiens
tagcactgcagggttcctggtggcc

SEQ ID NO: 8450 - DNA, 25 bp, Homo sapiens
tcatgaatggaacccctagcactgc

SEQ ID NO: 8451 - DNA, 25 bp, Homo sapiens
tctgagagctccgctgagcatctgg

SEQ ID NO: 8452 - DNA, 25 bp, Homo sapiens
ttaacagaatcaaggccaggctagg

SEQ ID NO: 8453 - DNA, 25 bp, Homo sapiens
accctgtggaagcatttcgcgatgg

SEQ ID NO: 8454 - DNA, 25 bp, Homo sapiens
cacaacctgaacctaggagtgcccc

SEQ ID NO: 8455 - DNA, 25 bp, Homo sapiens
ccatcgcccagttcattgaaaccac

SEQ ID NO: 8456 - DNA, 25 bp, Homo sapiens
cctatcccccagccatgaagaatgc

SEQ ID NO: 8457 - DNA, 25 bp, Homo sapiens
gaagcagcggtcagcagacaaggag

SEQ ID NO: 8458 - DNA, 25 bp, Homo sapiens
gacggaggcgcagtacaagttcatc

SEQ ID NO: 8459 - DNA, 25 bp, Homo sapiens
gaggaagtgagcggtgctgtcctca

SEQ ID NO: 8460 - DNA, 25 bp, Homo sapiens
gcagtcgcagaagggccaggagtcg

SEQ ID NO: 8461 - DNA, 25 bp, Homo sapiens
gccaggagtcggagtacgggaacat

SEQ ID NO: 8462 - DNA, 25 bp, Homo sapiens
gggcctggactgtgacattgacatc

SEQ ID NO: 8463 - DNA, 25 bp, Homo sapiens
ttcgcgatggacagactcacaacct

SEQ ID NO: 8464 - DNA, 25 bp, Homo sapiens
aagagggaacccatgggactctctg

SEQ ID NO: 8465 - DNA, 25 bp, Homo sapiens
actctctgctacattcagttcttgt

SEQ ID NO: 8466 - DNA, 25 bp, Homo sapiens
ctgcccgtgcagtgggaccagattc

SEQ ID NO: 8467 - DNA, 25 bp, Homo sapiens
ggcatttatttattcgtgcttcaaa

SEQ ID NO: 8468 - DNA, 25 bp, Homo sapiens
ggccaccctggaatcagaactgcac

SEQ ID NO: 8469 - DNA, 25 bp, Homo sapiens
ggggcttttatgtttgtccgatgga

SEQ ID NO: 8470 - DNA, 25 bp, Homo sapiens
ggtccaaagtcaccatgaggccacc

SEQ ID NO: 8471 - DNA, 25 bp, Homo sapiens
tgatgttctgaggtttgctttggtt

SEQ ID NO: 8472 - DNA, 25 bp, Homo sapiens
tgtgaaagttcttaacctgcccaaa

SEQ ID NO: 8473 - DNA, 25 bp, Homo sapiens
ttcggcgccaaaggtgacccgcgcc

SEQ ID NO: 8474 - DNA, 25 bp, Homo sapiens
ttctctccctgtgacacagcttgta

SEQ ID NO: 8475 - DNA, 25 bp, Homo sapiens
aaacactcaccagtacagcatcttc

SEQ ID NO: 8476 - DNA, 25 bp, Homo sapiens
aagcatcctcaatcccgatgggttt

SEQ ID NO: 8477 - DNA, 25 bp, Homo sapiens
aagtgggtgccaccaagatcactgt

SEQ ID NO: 8478 - DNA, 25 bp, Homo sapiens
cagtgcgggaagacacgctgctcac

SEQ ID NO: 8479 - DNA, 25 bp, Homo sapiens
cgatgggtttgctgcatatccctgc

SEQ ID NO: 8480 - DNA, 25 bp, Homo sapiens
ctttgagtctgacaagtgcttcccg

SEQ ID NO: 8481 - DNA, 25 bp, Homo sapiens
gcacttcctacaagtcctttgagtc

SEQ ID NO: 8482 - DNA, 25 bp, Homo sapiens
ggagaggctagcaatttcgctcgct

SEQ ID NO: 8483 - DNA, 25 bp, Homo sapiens
gggtttccatcacactgtctggaag

SEQ ID NO: 8484 - DNA, 25 bp, Homo sapiens
tcagggggattctcaaaccaggctc

SEQ ID NO: 8485 - DNA, 25 bp, Homo sapiens
tgcttcccgtgtccagatcaaggat

SEQ ID NO: 8486 - DNA, 25 bp, Homo sapiens
aaaatgagggtgaccctgctctccc

SEQ ID NO: 8487 - DNA, 25 bp, Homo sapiens
agccctgagcatgctgtctgaaggt

SEQ ID NO: 8488 - DNA, 25 bp, Homo sapiens
cccatattcctcagactcaacaatt

SEQ ID NO: 8489 - DNA, 25 bp, Homo sapiens
ctacagctgctctagccttagttgc

SEQ ID NO: 8490 - DNA, 25 bp, Homo sapiens
gcagacttctgacgaagccctgagc

SEQ ID NO: 8491 - DNA, 25 bp, Homo sapiens
gcttccgggaaggtgtctcaagtgg

SEQ ID NO: 8492 - DNA, 25 bp, Homo sapiens
ggaagttttctgaggctggctgtaa

SEQ ID NO: 8493 - DNA, 25 bp, Homo sapiens
gtctgaaggttctgatgccagcaca

SEQ ID NO: 8494 - DNA, 25 bp, Homo sapiens
tcatcaccagctagagcttcttccc

SEQ ID NO: 8495 - DNA, 25 bp, Homo sapiens
tgcactgccgaagtgtagcggcccc

SEQ ID NO: 8496 - DNA, 25 bp, Homo sapiens
tttagaactgtgttctcaccttccc

SEQ ID NO: 8497 - DNA, 25 bp, Homo sapiens
aatctttggtcttctcgacaggtgc

SEQ ID NO: 8498 - DNA, 25 bp, Homo sapiens
acagcatttctttggaaaccacctt

SEQ ID NO: 8499 - DNA, 25 bp, Homo sapiens
ggatatgcgaatctttggtcttctc

SEQ ID NO: 8500 - DNA, 25 bp, Homo sapiens
gtatgtgccagtacttaccagtcaa

SEQ ID NO: 8501 - DNA, 25 bp, Homo sapiens
gtcattcatatgagttcctgagtgg

SEQ ID NO: 8502 - DNA, 25 bp, Homo sapiens
gtgctttacaacttgaatgctgatt

SEQ ID NO: 8503 - DNA, 25 bp, Homo sapiens
taataaatattgtcctgtttcttca

SEQ ID NO: 8504 - DNA, 25 bp, Homo sapiens
taatcttttcagccttgtaaatggg

SEQ ID NO: 8505 - DNA, 25 bp, Homo sapiens
tatgagctttcgttgactgcttctc

SEQ ID NO: 8506 - DNA, 25 bp, Homo sapiens
tgcttctctgcagtcgttgatgcta

SEQ ID NO: 8507 - DNA, 25 bp, Homo sapiens
tttctcttaccactagttgcttaca

SEQ ID NO: 8508 - DNA, 25 bp, Homo sapiens
aaaactgctttaaggctgggccaca

SEQ ID NO: 8509 - DNA, 25 bp, Homo sapiens
aagacagctttcatgcagttttaca

SEQ ID NO: 8510 - DNA, 25 bp, Homo sapiens
attggccatcactgcatttttttat

SEQ ID NO: 8511 - DNA, 25 bp, Homo sapiens
ctatttctgcttgccattggccatc

SEQ ID NO: 8512 - DNA, 25 bp, Homo sapiens
cttgcttcatcccgttcagaagaca

SEQ ID NO: 8513 - DNA, 25 bp, Homo sapiens
gcaggattctgaagctcactcttta

SEQ ID NO: 8514 - DNA, 25 bp, Homo sapiens
gcttcactgaattcctgcattaacc

SEQ ID NO: 8515 - DNA, 25 bp, Homo sapiens
gtggctgttcagtttctatttctgc

SEQ ID NO: 8516 - DNA, 25 bp, Homo sapiens
tattggtatcaacatggcttcactg

SEQ ID NO: 8517 - DNA, 25 bp, Homo sapiens
tgagctttctgttggtattggacta

SEQ ID NO: 8518 - DNA, 25 bp, Homo sapiens
ttatctgcgaatctgcttgcttcat

SEQ ID NO: 8519 - DNA, 25 bp, Homo sapiens
acacctgcctgatgctatcaagagg

SEQ ID NO: 8520 - DNA, 25 bp, Homo sapiens
agatcgcaagaatgttctcaggctg

SEQ ID NO: 8521 - DNA, 25 bp, Homo sapiens
aggccagggtacgtgagcttgaagg

SEQ ID NO: 8522 - DNA, 25 bp, Homo sapiens
agtgcagagtaaacacacctgcctg

SEQ ID NO: 8523 - DNA, 25 bp, Homo sapiens
atctatctaaattccgcaaactcca

SEQ ID NO: 8524 - DNA, 25 bp, Homo sapiens
attgcgagtgaagagccgagaggtt

SEQ ID NO: 8525 - DNA, 25 bp, Homo sapiens
cctaccagactgaagaagatcgcaa

SEQ ID NO: 8526 - DNA, 25 bp, Homo sapiens
gctttatgacgtttattttcctgtt

SEQ ID NO: 8527 - DNA, 25 bp, Homo sapiens
ggaacaatccaatgctaatctatct

SEQ ID NO: 8528 - DNA, 25 bp, Homo sapiens
gtcccaggtcaacaaattgcgagtg

SEQ ID NO: 8529 - DNA, 25 bp, Homo sapiens
tgcagaggctgttaaaggtttacgg

SEQ ID NO: 8530 - DNA, 25 bp, Homo sapiens
aatacctagccttatgagttgtata

SEQ ID NO: 8531 - DNA, 25 bp, Homo sapiens
agtccaacttaatacctagccttat

SEQ ID NO: 8532 - DNA, 25 bp, Homo sapiens
caaatgctgagcaccagccacgtgc

SEQ ID NO: 8533 - DNA, 25 bp, Homo sapiens
ccacgtgcacagcagttgcttttac

SEQ ID NO: 8534 - DNA, 25 bp, Homo sapiens
gaacatggtgcttagggtctgagac

SEQ ID NO: 8535 - DNA, 25 bp, Homo sapiens
gatagtgttcagtagcagaatagaa

SEQ ID NO: 8536 - DNA, 25 bp, Homo sapiens
gatttaaatccatgtgtccaagggg

SEQ ID NO: 8537 - DNA, 25 bp, Homo sapiens
gtcttagctctacgatttaaatcca

SEQ ID NO: 8538 - DNA, 25 bp, Homo sapiens
gtgaaattccttctatttgatcata

SEQ ID NO: 8539 - DNA, 25 bp, Homo sapiens
gttgcttttactagtcttagctcta

SEQ ID NO: 8540 - DNA, 25 bp, Homo sapiens
tagggtctgagaccttttgaaaggt

SEQ ID NO: 8541 - DNA, 25 bp, Homo sapiens
aggagcagaaatttgtccagcacca

SEQ ID NO: 8542 - DNA, 25 bp, Homo sapiens
ccacataggccctgtgaacacctgg

SEQ ID NO: 8543 - DNA, 25 bp, Homo sapiens
ctaccgctgggtctgcgagacagag

SEQ ID NO: 8544 - DNA, 25 bp, Homo sapiens
ctcgggaattttcatctaggatttt

SEQ ID NO: 8545 - DNA, 25 bp, Homo sapiens
gaaatttgtccagcaccacataggc

SEQ ID NO: 8546 - DNA, 25 bp, Homo sapiens
gagcagccggacgactggtacggcc

SEQ ID NO: 8547 - DNA, 25 bp, Homo sapiens
gatagggtgatgttccgaaggtgag

SEQ ID NO: 8548 - DNA, 25 bp, Homo sapiens
gggtctgcgagacagagctggacaa

SEQ ID NO: 8549 - DNA, 25 bp, Homo sapiens
ggtgaggagcttgaaacccgtggcg

SEQ ID NO: 8550 - DNA, 25 bp, Homo sapiens
tcttctgctttctcgggaattttca

SEQ ID NO: 8551 - DNA, 25 bp, Homo sapiens
tgccgcaggggtccgggattgggaa

SEQ ID NO: 8552 - DNA, 25 bp, Homo sapiens
agctggcgcgtgagaacagcagcat

SEQ ID NO: 8553 - DNA, 25 bp, Homo sapiens
ccctcgtacctgtcactgggatgca

SEQ ID NO: 8554 - DNA, 25 bp, Homo sapiens
gcacccgtgggagtcgggacatata

SEQ ID NO: 8555 - DNA, 25 bp, Homo sapiens
ggaagagactgtattgcagggtgaa

SEQ ID NO: 8556 - DNA, 25 bp, Homo sapiens
ggtggagaagctggcgcgtgagaac

SEQ ID NO: 8557 - DNA, 25 bp, Homo sapiens
gtacctgtcactgggatgcagactc

SEQ ID NO: 8558 - DNA, 25 bp, Homo sapiens
gtatcttgcacccgtgggagtcggg

SEQ ID NO: 8559 - DNA, 25 bp, Homo sapiens
gtcactgggatgcagactctcgaca

SEQ ID NO: 8560 - DNA, 25 bp, Homo sapiens
gtgtctgtgtgtgggaattggtatc

SEQ ID NO: 8561 - DNA, 25 bp, Homo sapiens
tctcgacatccgagtccaagcgcag

SEQ ID NO: 8562 - DNA, 25 bp, Homo sapiens
tgcagactctcgacatccgagtcca

SEQ ID NO: 8563 - DNA, 25 bp, Homo sapiens
aggtgaaacagggcttgtccctcca

SEQ ID NO: 8564 - DNA, 25 bp, Homo sapiens
atactcgacgatcgacacgtggcca

SEQ ID NO: 8565 - DNA, 25 bp, Homo sapiens
cagcaagctccaagactgagcccag

SEQ ID NO: 8566 - DNA, 25 bp, Homo sapiens
ccgccactggacagggctgaggtgt

SEQ ID NO: 8567 - DNA, 25 bp, Homo sapiens
cctcagcctcgtggacatggggagt

SEQ ID NO: 8568 - DNA, 25 bp, Homo sapiens
cggaggcatgatcgtcatcacttcc

SEQ ID NO: 8569 - DNA, 25 bp, Homo sapiens
cttctttctacttgtgggttttgct

SEQ ID NO: 8570 - DNA, 25 bp, Homo sapiens
gtcctggtcaatatgtccacgggct

SEQ ID NO: 8571 - DNA, 25 bp, Homo sapiens
tcggcagccacggagtacaggttca

SEQ ID NO: 8572 - DNA, 25 bp, Homo sapiens
tgcagcggtggttgtcacaccctga

SEQ ID NO: 8573 - DNA, 25 bp, Homo sapiens
tggggaaacgactcacgactcccaa

SEQ ID NO: 8574 - DNA, 25 bp, Homo sapiens
aactctgggatcttaaaggtcgacg

SEQ ID NO: 8575 - DNA, 25 bp, Homo sapiens
ccagcctggcgtggctggggctggg

SEQ ID NO: 8576 - DNA, 25 bp, Homo sapiens
gatggggtttattaactctgggatc

SEQ ID NO: 8577 - DNA, 25 bp, Homo sapiens
gcaggaaggatcactcggtgaacaa

SEQ ID NO: 8578 - DNA, 25 bp, Homo sapiens
gcgacactttttctcagactatctg

SEQ ID NO: 8579 - DNA, 25 bp, Homo sapiens
gctggacatctccaggaaaccaggc

SEQ ID NO: 8580 - DNA, 25 bp, Homo sapiens
ggactgctgcgagaaggatttgtgc

SEQ ID NO: 8581 - DNA, 25 bp, Homo sapiens
gttaagcgacactttttctcagact

SEQ ID NO: 8582 - DNA, 25 bp, Homo sapiens
taaaggtcgacgtggactgctgcga

SEQ ID NO: 8583 - DNA, 25 bp, Homo sapiens
tcctcctgtgacttcgttaagcgac

SEQ ID NO: 8584 - DNA, 25 bp, Homo sapiens
ttgtgcaatggggcggcaggggcag

SEQ ID NO: 8585 - DNA, 25 bp, Homo sapiens
aacctcatccctctaacaatataat

SEQ ID NO: 8586 - DNA, 25 bp, Homo sapiens
acccctgctgatgccacagagaata

SEQ ID NO: 8587 - DNA, 25 bp, Homo sapiens
atcaatatttgtaggccaggcgtgg

SEQ ID NO: 8588 - DNA, 25 bp, Homo sapiens
catcctctggaccatactgcggagg

SEQ ID NO: 8589 - DNA, 25 bp, Homo sapiens
catgctgattatgcacggcgtccat

SEQ ID NO: 8590 - DNA, 25 bp, Homo sapiens
cttcgtggcttcctcaaatcaggtc

SEQ ID NO: 8591 - DNA, 25 bp, Homo sapiens
ggcttcctcaaatcaggtcttcata

SEQ ID NO: 8592 - DNA, 25 bp, Homo sapiens
gggacagctaagtgggtaacaactc

SEQ ID NO: 8593 - DNA, 25 bp, Homo sapiens
gtaacaactcgtgttcactcagcac

SEQ ID NO: 8594 - DNA, 25 bp, Homo sapiens
tccatccgcattccgattaacttgg

SEQ ID NO: 8595 - DNA, 25 bp, Homo sapiens
ttttcaccaaaccatggatagaatc

SEQ ID NO: 8596 - DNA, 25 bp, Homo sapiens
aacatcttcatttataaccacatca

SEQ ID NO: 8597 - DNA, 25 bp, Homo sapiens
acccttgtgtatgtatcacccaact

SEQ ID NO: 8598 - DNA, 25 bp, Homo sapiens
acctggtgatggatcccttactatt

SEQ ID NO: 8599 - DNA, 25 bp, Homo sapiens
acgtctccaacatcttcatttataa

SEQ ID NO: 8600 - DNA, 25 bp, Homo sapiens
ctctctaccctcacgttattttgaa

SEQ ID NO: 8601 - DNA, 25 bp, Homo sapiens
cttatttacgcttgaacctcgaaca

SEQ ID NO: 8602 - DNA, 25 bp, Homo sapiens
ggcttcatcctcacctatagaaaat

SEQ ID NO: 8603 - DNA, 25 bp, Homo sapiens
gtatcacccaactcactaattatca

SEQ ID NO: 8604 - DNA, 25 bp, Homo sapiens
tctcgtgcccaaacctggtgatgga

SEQ ID NO: 8605 - DNA, 25 bp, Homo sapiens
tgtgctatcagatatcctctctacc

SEQ ID NO: 8606 - DNA, 25 bp, Homo sapiens
ttccttggggagaaatctcgtgccc

SEQ ID NO: 8607 - DNA, 25 bp, Homo sapiens
acgcactgggcattgggtaagggac

SEQ ID NO: 8608 - DNA, 25 bp, Homo sapiens
agatgctgctgagcacatctcttca

SEQ ID NO: 8609 - DNA, 25 bp, Homo sapiens
atctggcccaacatacgcactgggc

SEQ ID NO: 8610 - DNA, 25 bp, Homo sapiens
cgcagtccccaggtatctgatgatg

SEQ ID NO: 8611 - DNA, 25 bp, Homo sapiens
cttctttcctcttaatgtctcaaaa

SEQ ID NO: 8612 - DNA, 25 bp, Homo sapiens
gaggcagagacctcctgatgtcttg

SEQ ID NO: 8613 - DNA, 25 bp, Homo sapiens
gaggccaaatgagttcccttgattc

SEQ ID NO: 8614 - DNA, 25 bp, Homo sapiens
gatgtcttggtttccatcaaagccc

SEQ ID NO: 8615 - DNA, 25 bp, Homo sapiens
ggctgccaagagtccaagccatctg

SEQ ID NO: 8616 - DNA, 25 bp, Homo sapiens
gggtaagggactccagaagcagcag

SEQ ID NO: 8617 - DNA, 25 bp, Homo sapiens
tcttcaatccccataatgcttcttt

SEQ ID NO: 8618 - DNA, 25 bp, Homo sapiens
aatatacctagcactcagatcttcg

SEQ ID NO: 8619 - DNA, 25 bp, Homo sapiens
atacacatgcctccatgcatatatg

SEQ ID NO: 8620 - DNA, 25 bp, Homo sapiens
atatttactaatcctatctgccaaa

SEQ ID NO: 8621 - DNA, 25 bp, Homo sapiens
ctagcactcagatcttcgtgtctaa

SEQ ID NO: 8622 - DNA, 25 bp, Homo sapiens
gagcttgaaatatcttgttatgcca

SEQ ID NO: 8623 - DNA, 25 bp, Homo sapiens
gatgggagtcaggatgttcactatg

SEQ ID NO: 8624 - DNA, 25 bp, Homo sapiens
gccaaacttgagccaatctgagagc

SEQ ID NO: 8625 - DNA, 25 bp, Homo sapiens
ggatgattccaaagcaagggcaagg

SEQ ID NO: 8626 - DNA, 25 bp, Homo sapiens
tagacacaaaaacacctcagcagaa

SEQ ID NO: 8627 - DNA, 25 bp, Homo sapiens
tattgccaaaacatagagccagctt

SEQ ID NO: 8628 - DNA, 25 bp, Homo sapiens
tcgtgtctaatatagtttgccacta

SEQ ID NO: 8629 - DNA, 25 bp, Homo sapiens
aagtggggctaggtcttgccaactc

SEQ ID NO: 8630 - DNA, 25 bp, Homo sapiens
agcactttaaaaacaggccagcctg

SEQ ID NO: 8631 - DNA, 25 bp, Homo sapiens
aggggtctggaggacggggagagct

SEQ ID NO: 8632 - DNA, 25 bp, Homo sapiens
caagcacggggctggcagggcgtga

SEQ ID NO: 8633 - DNA, 25 bp, Homo sapiens
gaggagagacctgcgtgggataatc

SEQ ID NO: 8634 - DNA, 25 bp, Homo sapiens
gagggagacaggaacggctctgggg

SEQ ID NO: 8635 - DNA, 25 bp, Homo sapiens
gcagggcgtgaggaactctcctgtg

SEQ ID NO: 8636 - DNA, 25 bp, Homo sapiens
ggagcactgcatgtcagagcacttt

SEQ ID NO: 8637 - DNA, 25 bp, Homo sapiens
gtgggataatcaacaggggtctgga

SEQ ID NO: 8638 - DNA, 25 bp, Homo sapiens
tatcagatctgactgcgtgttctca

SEQ ID NO: 8639 - DNA, 25 bp, Homo sapiens
tcttgccaactccatcttcaataaa

SEQ ID NO: 8640 - DNA, 25 bp, Homo sapiens
cagcatcgtgtgggtccctaagcac

SEQ ID NO: 8641 - DNA, 25 bp, Homo sapiens
ccaaaagctgctttccatggcacac

SEQ ID NO: 8642 - DNA, 25 bp, Homo sapiens
cctacgtgctgcccgagggcagggg

SEQ ID NO: 8643 - DNA, 25 bp, Homo sapiens
ctgtcccctgcaagtggacgtgggc

SEQ ID NO: 8644 - DNA, 25 bp, Homo sapiens
ggccgctgcagtcagcacagagagc

SEQ ID NO: 8645 - DNA, 25 bp, Homo sapiens
gggactggagtgtaatgctcggtgg

SEQ ID NO: 8646 - DNA, 25 bp, Homo sapiens
gtagcaacccaggtgttgtccgtgt

SEQ ID NO: 8647 - DNA, 25 bp, Homo sapiens
gttgtccgtgtctgttgaccaatct

SEQ ID NO: 8648 - DNA, 25 bp, Homo sapiens
tgaccaatctctattcagcatcgtg

SEQ ID NO: 8649 - DNA, 25 bp, Homo sapiens
ttcatgcctcaagtcggtgggcctg

SEQ ID NO: 8650 - DNA, 25 bp, Homo sapiens
ttctggggaggggctccgtgtagca

SEQ ID NO: 8651 - DNA, 25 bp, Homo sapiens
aactgtgaccgtttctgtgtgaaga

SEQ ID NO: 8652 - DNA, 25 bp, Homo sapiens
atggcattttacaaactgtgaccgt

SEQ ID NO: 8653 - DNA, 25 bp, Homo sapiens
cctccaagtgaggacttggctcccc

SEQ ID NO: 8654 - DNA, 25 bp, Homo sapiens
ctctacagattgccctccaagtgag

SEQ ID NO: 8655 - DNA, 25 bp, Homo sapiens
ctgtatttgtggtctctgtatttat

SEQ ID NO: 8656 - DNA, 25 bp, Homo sapiens
ggaccctgaactcagactctacaga

SEQ ID NO: 8657 - DNA, 25 bp, Homo sapiens
gtgaccgtttctgtgtgaagatttt

SEQ ID NO: 8658 - DNA, 25 bp, Homo sapiens
gtgttcctatccaatttcaaaaaag

SEQ ID NO: 8659 - DNA, 25 bp, Homo sapiens
gtttagcaccgtcagtgttcctatc

SEQ ID NO: 8660 - DNA, 25 bp, Homo sapiens
tatatttatgtttagcaccgtcagt

SEQ ID NO: 8661 - DNA, 25 bp, Homo sapiens
ttagctgtatttgtggtctctgtat

SEQ ID NO: 8662 - DNA, 25 bp, Homo sapiens
agaggtccaagaaagctggccgcca

SEQ ID NO: 8663 - DNA, 25 bp, Homo sapiens
aggttggtcatcaggatggccaccc

SEQ ID NO: 8664 - DNA, 25 bp, Homo sapiens
ctccacccagcagtgtcctggggag

SEQ ID NO: 8665 - DNA, 25 bp, Homo sapiens
ctctttccctgccacgtggaaacaa

SEQ ID NO: 8666 - DNA, 25 bp, Homo sapiens
gccaggacgttctagcaggtcatcg

SEQ ID NO: 8667 - DNA, 25 bp, Homo sapiens
gccttccaccggagagactactgac

SEQ ID NO: 8668 - DNA, 25 bp, Homo sapiens
gctcctcttggagaagctgttgctg

SEQ ID NO: 8669 - DNA, 25 bp, Homo sapiens
ggccgccattaaacaggttctgacc

SEQ ID NO: 8670 - DNA, 25 bp, Homo sapiens
tagcaggtcatcggtgctttgctgt

SEQ ID NO: 8671 - DNA, 25 bp, Homo sapiens
tggaaacaatcatcagatccttgcc

SEQ ID NO: 8672 - DNA, 25 bp, Homo sapiens
ttcccatgctgcaatttcttcctga

SEQ ID NO: 8673 - DNA, 25 bp, Homo sapiens
acaagtccctcatggcacaggagaa

SEQ ID NO: 8674 - DNA, 25 bp, Homo sapiens
caccatggtcattgtgcttacgtcg

SEQ ID NO: 8675 - DNA, 25 bp, Homo sapiens
ctcaattggagcggccgtcatcgag

SEQ ID NO: 8676 - DNA, 25 bp, Homo sapiens
cttcgcacaatgaccaacgtactgg

SEQ ID NO: 8677 - DNA, 25 bp, Homo sapiens
gcatcccggggacggggaggcaacg

SEQ ID NO: 8678 - DNA, 25 bp, Homo sapiens
gtcagatcacaaccatcagcatcac

SEQ ID NO: 8679 - DNA, 25 bp, Homo sapiens
taacaactacgagctcaacctgggt

SEQ ID NO: 8680 - DNA, 25 bp, Homo sapiens
tcaacatggatggcactgccctcta

SEQ ID NO: 8681 - DNA, 25 bp, Homo sapiens
tggggaaaccctacaagtccctcat

SEQ ID NO: 8682 - DNA, 25 bp, Homo sapiens
tgggggcatgctacaagccctcatc

SEQ ID NO: 8683 - DNA, 25 bp, Homo sapiens
ttcaggaagctgagcttaccctccc

SEQ ID NO: 8684 - DNA, 25 bp, Homo sapiens
aatcacccaaggatggatatcagga

SEQ ID NO: 8685 - DNA, 25 bp, Homo sapiens
agacaatacactgtgaaccttgcta

SEQ ID NO: 8686 - DNA, 25 bp, Homo sapiens
atctggtctctggctagagttagca

SEQ ID NO: 8687 - DNA, 25 bp, Homo sapiens
atgtgcacttactgccgaaaaccct

SEQ ID NO: 8688 - DNA, 25 bp, Homo sapiens
attcaacttctgataggtctgtcat

SEQ ID NO: 8689 - DNA, 25 bp, Homo sapiens
gatgaattacaaatttgctgccatt

SEQ ID NO: 8690 - DNA, 25 bp, Homo sapiens
gctttcacattgaagatcaactctt

SEQ ID NO: 8691 - DNA, 25 bp, Homo sapiens
gtgaaatatgcaagcagcctttgga

SEQ ID NO: 8692 - DNA, 25 bp, Homo sapiens
gtggattccataactctggcacaag

SEQ ID NO: 8693 - DNA, 25 bp, Homo sapiens
tactgccgaaaacccttgggtgtag

SEQ ID NO: 8694 - DNA, 25 bp, Homo sapiens
tttgctgccattctacttgctttaa

SEQ ID NO: 8695 - DNA, 25 bp, Homo sapiens
agcgatataaccttgctttgcaaac

SEQ ID NO: 8696 - DNA, 25 bp, Homo sapiens
ccatttccattttgaactgctattt

SEQ ID NO: 8697 - DNA, 25 bp, Homo sapiens
cctcagtgatgcattagatctctaa

SEQ ID NO: 8698 - DNA, 25 bp, Homo sapiens
gaatctggtgttgatgcaatgcctc

SEQ ID NO: 8699 - DNA, 25 bp, Homo sapiens
gacattcttttgtaccttgttcaac

SEQ ID NO: 8700 - DNA, 25 bp, Homo sapiens
gagtgctgtaaacttgctgtaacat

SEQ ID NO: 8701 - DNA, 25 bp, Homo sapiens
gcaaacacattgtctaatctttcaa

SEQ ID NO: 8702 - DNA, 25 bp, Homo sapiens
gcaagcgttaactttggtcttctgt

SEQ ID NO: 8703 - DNA, 25 bp, Homo sapiens
gcaattgcaagttgccctgctaggc

SEQ ID NO: 8704 - DNA, 25 bp, Homo sapiens
taatctggcattaacttattttcta

SEQ ID NO: 8705 - DNA, 25 bp, Homo sapiens
tattgtgctttttacttgagtcgtc

SEQ ID NO: 8706 - DNA, 25 bp, Homo sapiens
aacaatcagctcacaggcatcaata

SEQ ID NO: 8707 - DNA, 25 bp, Homo sapiens
aagattagcatgcatgtttggttct

SEQ ID NO: 8708 - DNA, 25 bp, Homo sapiens
agccctagtctatggagttttctga

SEQ ID NO: 8709 - DNA, 25 bp, Homo sapiens
agtgctaatgtgtattcgaacccaa

SEQ ID NO: 8710 - DNA, 25 bp, Homo sapiens
atactccatggttattttaagctac

SEQ ID NO: 8711 - DNA, 25 bp, Homo sapiens
gctacctacatgctgtcattgaaca

SEQ ID NO: 8712 - DNA, 25 bp, Homo sapiens
gctctatggcggggaaagccctagt

SEQ ID NO: 8713 - DNA, 25 bp, Homo sapiens
ggacacaagatgtagtcgatcctta

SEQ ID NO: 8714 - DNA, 25 bp, Homo sapiens
gtcgatccttatgcgattatatcat

SEQ ID NO: 8715 - DNA, 25 bp, Homo sapiens
gtcttaaagagttttgtgccctggc

SEQ ID NO: 8716 - DNA, 25 bp, Homo sapiens
tgattaccttaatgagttgggacct

SEQ ID NO: 8717 - DNA, 25 bp, Homo sapiens
atatttcagaggctccattcacagc

SEQ ID NO: 8718 - DNA, 25 bp, Homo sapiens
atcttgcttaagtagcaggctcact

SEQ ID NO: 8719 - DNA, 25 bp, Homo sapiens
gacatgtgaacttggttcagtccaa

SEQ ID NO: 8720 - DNA, 25 bp, Homo sapiens
gcactatcctgttcacgaagacatg

SEQ ID NO: 8721 - DNA, 25 bp, Homo sapiens
ggagtgttcagatggactgttttaa

SEQ ID NO: 8722 - DNA, 25 bp, Homo sapiens
gttatggcaagagaaactcagcctc

SEQ ID NO: 8723 - DNA, 25 bp, Homo sapiens
taaaccagtgctctccattagaaat

SEQ ID NO: 8724 - DNA, 25 bp, Homo sapiens
tagagaaagtccaataactctcccc

SEQ ID NO: 8725 - DNA, 25 bp, Homo sapiens
tctttaagtttcgattctggagcaa

SEQ ID NO: 8726 - DNA, 25 bp, Homo sapiens
ttaacttcattttgtatcttgctta

SEQ ID NO: 8727 - DNA, 25 bp, Homo sapiens
ttttgggactgcactatcctgttca

SEQ ID NO: 8728 - DNA, 25 bp, Homo sapiens
aagaacaactggaccctgctatctt

SEQ ID NO: 8729 - DNA, 25 bp, Homo sapiens
aagcacacgctgaacaagccatagg

SEQ ID NO: 8730 - DNA, 25 bp, Homo sapiens
aattttcatggcggaatgtctcccc

SEQ ID NO: 8731 - DNA, 25 bp, Homo sapiens
acaactcaagttggggccagtcaat

SEQ ID NO: 8732 - DNA, 25 bp, Homo sapiens
acgacccacgatttgaggttacact

SEQ ID NO: 8733 - DNA, 25 bp, Homo sapiens
agatttctcaggaagcacctcattc

SEQ ID NO: 8734 - DNA, 25 bp, Homo sapiens
cacctcattccagatgtgaccagtc

SEQ ID NO: 8735 - DNA, 25 bp, Homo sapiens
cctgctatcttaccctggggcaggc

SEQ ID NO: 8736 - DNA, 25 bp, Homo sapiens
ccttggggttactagagctctatcg

SEQ ID NO: 8737 - DNA, 25 bp, Homo sapiens
gagctctatcgcacttttgagacaa

SEQ ID NO: 8738 - DNA, 25 bp, Homo sapiens
gggaggagaggtgatcccacacgca

SEQ ID NO: 8739 - DNA, 25 bp, Homo sapiens
aacttggagctcagctattcggcgc

SEQ ID NO: 8740 - DNA, 25 bp, Homo sapiens
actggtggcagatttcgcttttcgt

SEQ ID NO: 8741 - DNA, 25 bp, Homo sapiens
cagaatgtttgcgcagcttcgcttc

SEQ ID NO: 8742 - DNA, 25 bp, Homo sapiens
ccaaaatgaccttcaggaccggcct

SEQ ID NO: 8743 - DNA, 25 bp, Homo sapiens
ccctgctttcgtgcattttgtaaaa

SEQ ID NO: 8744 - DNA, 25 bp, Homo sapiens
gagtagcgatattgtcagccgtctt

SEQ ID NO: 8745 - DNA, 25 bp, Homo sapiens
gtaaacgttctgacaactggtggca

SEQ ID NO: 8746 - DNA, 25 bp, Homo sapiens
gtcagccgtcttctaaagcaagtgg

SEQ ID NO: 8747 - DNA, 25 bp, Homo sapiens
tcccagcgttaatgtcgtcacttga

SEQ ID NO: 8748 - DNA, 25 bp, Homo sapiens
ttatggccatgtaaacgttctgaca

SEQ ID NO: 8749 - DNA, 25 bp, Homo sapiens
ttcgcttttcgttgtaaatatcggt

SEQ ID NO: 8750 - DNA, 25 bp, Homo sapiens
aaaccgtgtcacttataagcacagt

SEQ ID NO: 8751 - DNA, 25 bp, Homo sapiens
accggtttcagtgttgtatatataa

SEQ ID NO: 8752 - DNA, 25 bp, Homo sapiens
actttgatttcaattgcggcttgcc

SEQ ID NO: 8753 - DNA, 25 bp, Homo sapiens
agtataacttgtatatcttgactct

SEQ ID NO: 8754 - DNA, 25 bp, Homo sapiens
gactctgtggtagatttcaagttca

SEQ ID NO: 8755 - DNA, 25 bp, Homo sapiens
ggaagctatttccaatcacattggt

SEQ ID NO: 8756 - DNA, 25 bp, Homo sapiens
gtgtttgagaaattttgccttgcca

SEQ ID NO: 8757 - DNA, 25 bp, Homo sapiens
gtgtttttaacctgtacattgtgta

SEQ ID NO: 8758 - DNA, 25 bp, Homo sapiens
tattgccaaaggaactgtctgtaag

SEQ ID NO: 8759 - DNA, 25 bp, Homo sapiens
tcaattgcggcttgccattttctta

SEQ ID NO: 8760 - DNA, 25 bp, Homo sapiens
ttatctttcacctgaaacaacctag

SEQ ID NO: 8761 - DNA, 25 bp, Homo sapiens
aaaagccctggtcaggactgtcctc

SEQ ID NO: 8762 - DNA, 25 bp, Homo sapiens
agggagaagcggttgcagctgtttc

SEQ ID NO: 8763 - DNA, 25 bp, Homo sapiens
caagaagacgggccagtccttcttc

SEQ ID NO: 8764 - DNA, 25 bp, Homo sapiens
gatcccaccttgagggagaagcggt

SEQ ID NO: 8765 - DNA, 25 bp, Homo sapiens
gatgatcccaccttgagggagaagc

SEQ ID NO: 8766 - DNA, 25 bp, Homo sapiens
gcttcaagaagacgggccagtcctt

SEQ ID NO: 8767 - DNA, 25 bp, Homo sapiens
ggatagcaaaagccctggtcaggac

SEQ ID NO: 8768 - DNA, 25 bp, Homo sapiens
gggcttcaagaagacgggccagtcc

SEQ ID NO: 8769 - DNA, 25 bp, Homo sapiens
gtattggtcagaatagaatccattc

SEQ ID NO: 8770 - DNA, 25 bp, Homo sapiens
gttgatgatcccaccttgagggaga

SEQ ID NO: 8771 - DNA, 25 bp, Homo sapiens
tgtggttccttgccaaaaaaccctg

SEQ ID NO: 8772 - DNA, 25 bp, Homo sapiens
aaaggctctgaaagccagctgccga

SEQ ID NO: 8773 - DNA, 25 bp, Homo sapiens
ctttggccattccaacagctcaagt

SEQ ID NO: 8774 - DNA, 25 bp, Homo sapiens
gatcaagtcaccggagctttcaaag

SEQ ID NO: 8775 - DNA, 25 bp, Homo sapiens
gctgaggatttcaagcctgcctagg

SEQ ID NO: 8776 - DNA, 25 bp, Homo sapiens
ggtctgtcccaccagctaggtgggg

SEQ ID NO: 8777 - DNA, 25 bp, Homo sapiens
taattgatttcaagaccttctcccc

SEQ ID NO: 8778 - DNA, 25 bp, Homo sapiens
taggcatgagggatcacagggcccc

SEQ ID NO: 8779 - DNA, 25 bp, Homo sapiens
taggtggggcctagatccacacaca

SEQ ID NO: 8780 - DNA, 25 bp, Homo sapiens
tccctgatgtctgtctggctgagga

SEQ ID NO: 8781 - DNA, 25 bp, Homo sapiens
tgaccatttcaggggtcgtcaccac

SEQ ID NO: 8782 - DNA, 25 bp, Homo sapiens
tgagagggcatgcgcacaaggctga

SEQ ID NO: 8783 - DNA, 25 bp, Homo sapiens
aaggcagtgccatgcaagctgttta

SEQ ID NO: 8784 - DNA, 25 bp, Homo sapiens
aaggcagtgtaacaatccacctcct

SEQ ID NO: 8785 - DNA, 25 bp, Homo sapiens
aggatcacgctgtgactgcatctgt

SEQ ID NO: 8786 - DNA, 25 bp, Homo sapiens
agtccctgtcctgaaaggatcacgc

SEQ ID NO: 8787 - DNA, 25 bp, Homo sapiens
cctacaccagtttccacctggagtt

SEQ ID NO: 8788 - DNA, 25 bp, Homo sapiens
gacagccacagattttgcctattcc

SEQ ID NO: 8789 - DNA, 25 bp, Homo sapiens
gatcccaaggcctagcctgtgaggt

SEQ ID NO: 8790 - DNA, 25 bp, Homo sapiens
gcttcagaaacacttgactgctcct

SEQ ID NO: 8791 - DNA, 25 bp, Homo sapiens
ggtggagcctctgtatgaactagtg

SEQ ID NO: 8792 - DNA, 25 bp, Homo sapiens
tacaatgagagccctgagccctcaa

SEQ ID NO: 8793 - DNA, 25 bp, Homo sapiens
tcctatcggaagaatacccccattg

SEQ ID NO: 8794 - DNA, 25 bp, Homo sapiens
aacggaggctgggtaggtgcatctg

SEQ ID NO: 8795 - DNA, 25 bp, Homo sapiens
agatcgggggttggagtgcgggtgg

SEQ ID NO: 8796 - DNA, 25 bp, Homo sapiens
aggccacaggtccgagatcgggggt

SEQ ID NO: 8797 - DNA, 25 bp, Homo sapiens
atgggaggctgtggagccggcgaaa

SEQ ID NO: 8798 - DNA, 25 bp, Homo sapiens
gcatctggtgatgtgagtctgggct

SEQ ID NO: 8799 - DNA, 25 bp, Homo sapiens
gccggcgaaataaaatcagagttgt

SEQ ID NO: 8800 - DNA, 25 bp, Homo sapiens
gctgggtaggtgcatctggtgatgt

SEQ ID NO: 8801 - DNA, 25 bp, Homo sapiens
ggcaatgggaggctgtggagccggc

SEQ ID NO: 8802 - DNA, 25 bp, Homo sapiens
ggctcctgggcaatgggaggctgtg

SEQ ID NO: 8803 - DNA, 25 bp, Homo sapiens
ggctgtggagccggcgaaataaaat

SEQ ID NO: 8804 - DNA, 25 bp, Homo sapiens
gtccgagatcgggggttggagtgcg

SEQ ID NO: 8805 - DNA, 25 bp, Homo sapiens
attactgcaccatgtttacttcaaa

SEQ ID NO: 8806 - DNA, 25 bp, Homo sapiens
caagatccccgacttgactgatgtg

SEQ ID NO: 8807 - DNA, 25 bp, Homo sapiens
caggtagatctttagcagtcttttc

SEQ ID NO: 8808 - DNA, 25 bp, Homo sapiens
cagtcttttctagtttccctggatt

SEQ ID NO: 8809 - DNA, 25 bp, Homo sapiens
cgatactgctgtttctcgaggtaag

SEQ ID NO: 8810 - DNA, 25 bp, Homo sapiens
gagattcagccatccaattggtttt

SEQ ID NO: 8811 - DNA, 25 bp, Homo sapiens
gagctctattaattgccatgtttac

SEQ ID NO: 8812 - DNA, 25 bp, Homo sapiens
gaggtctgttctaatggttccattt

SEQ ID NO: 8813 - DNA, 25 bp, Homo sapiens
ggttttaggtcttgcatatcagttt

SEQ ID NO: 8814 - DNA, 25 bp, Homo sapiens
gtctaccgtggtccaggttatcagc

SEQ ID NO: 8815 - DNA, 25 bp, Homo sapiens
ttccatttagactactttcctcttc

SEQ ID NO: 8816 - DNA, 25 bp, Homo sapiens
caagcattttgtgaactagggaagc

SEQ ID NO: 8817 - DNA, 25 bp, Homo sapiens
cacgccctaagcgcacattcatgtg

SEQ ID NO: 8818 - DNA, 25 bp, Homo sapiens
catgtgggcatttcttgcgagcctc

SEQ ID NO: 8819 - DNA, 25 bp, Homo sapiens
cctccggaagctgtcgacttcatga

SEQ ID NO: 8820 - DNA, 25 bp, Homo sapiens
cttttcactgtgttggagttttctg

SEQ ID NO: 8821 - DNA, 25 bp, Homo sapiens
gaagctgtcgacttcatgacaagca

SEQ ID NO: 8822 - DNA, 25 bp, Homo sapiens
gcttctcttgagtcacactgctagc

SEQ ID NO: 8823 - DNA, 25 bp, Homo sapiens
ggaagctcaggggggttactggctt

SEQ ID NO: 8824 - DNA, 25 bp, Homo sapiens
gttactggcttctcttgagtcacac

SEQ ID NO: 8825 - DNA, 25 bp, Homo sapiens
gttggagttttctggagtgagcact

SEQ ID NO: 8826 - DNA, 25 bp, Homo sapiens
tgagtcacactgctagcaaatggca

SEQ ID NO: 8827 - DNA, 25 bp, Homo sapiens
cacggactaagacccagtggtgctc

SEQ ID NO: 8828 - DNA, 25 bp, Homo sapiens
gctctttgagagtttacgcccatga

SEQ ID NO: 8829 - DNA, 25 bp, Homo sapiens
ggcattccaacatgtcagtgatact

SEQ ID NO: 8830 - DNA, 25 bp, Homo sapiens
gtatagtcaacctcatcattaatgt

SEQ ID NO: 8831 - DNA, 25 bp, Homo sapiens
gtttcagtttcatctggcattccaa

SEQ ID NO: 8832 - DNA, 25 bp, Homo sapiens
taaaactggctcaatccttctgatc

SEQ ID NO: 8833 - DNA, 25 bp, Homo sapiens
taagtgtttcatttagcagccttca

SEQ ID NO: 8834 - DNA, 25 bp, Homo sapiens
tacgcccatgactgcagaagactga

SEQ ID NO: 8835 - DNA, 25 bp, Homo sapiens
tctactgacggccaataccactaaa

SEQ ID NO: 8836 - DNA, 25 bp, Homo sapiens
tgggtagagtaactctcccactcca

SEQ ID NO: 8837 - DNA, 25 bp, Homo sapiens
ttcttgctcttttgggtgtcatcat

SEQ ID NO: 8838 - DNA, 25 bp, Homo sapiens
accaaaatgaagacacgcccgactc

SEQ ID NO: 8839 - DNA, 25 bp, Homo sapiens
agaggagcctttccagaactaccaa

SEQ ID NO: 8840 - DNA, 25 bp, Homo sapiens
agattaacaacactgcatgcggcaa

SEQ ID NO: 8841 - DNA, 25 bp, Homo sapiens
atgcggcaaaccgcatgctcttacc

SEQ ID NO: 8842 - DNA, 25 bp, Homo sapiens
caaccactatcttttgttctacctg

SEQ ID NO: 8843 - DNA, 25 bp, Homo sapiens
gagtctcactagcacatggaggccc

SEQ ID NO: 8844 - DNA, 25 bp, Homo sapiens
gttcaatcaaactttcagctttttt

SEQ ID NO: 8845 - DNA, 25 bp, Homo sapiens
gttctacctgtattgtctgacttct

SEQ ID NO: 8846 - DNA, 25 bp, Homo sapiens
tctgcataccaggggttccccagga

SEQ ID NO: 8847 - DNA, 25 bp, Homo sapiens
tgtccaatctgcaagtcccagggag

SEQ ID NO: 8848 - DNA, 25 bp, Homo sapiens
ttcagccattcacaacacaatcaaa

SEQ ID NO: 8849 - DNA, 25 bp, Homo sapiens
aagctacgttgactatttctcctcg

SEQ ID NO: 8850 - DNA, 25 bp, Homo sapiens
acacaggtccacaggatgctcagga

SEQ ID NO: 8851 - DNA, 25 bp, Homo sapiens
accagccagggtccctgtgtggcta

SEQ ID NO: 8852 - DNA, 25 bp, Homo sapiens
atcaggccctggcagacatgctgga

SEQ ID NO: 8853 - DNA, 25 bp, Homo sapiens
ccagtgccagcactgtcagttctgc

SEQ ID NO: 8854 - DNA, 25 bp, Homo sapiens
ctccttctgcaatcgatgcactgaa

SEQ ID NO: 8855 - DNA, 25 bp, Homo sapiens
ctgcgctccaggaagctacgttgac

SEQ ID NO: 8856 - DNA, 25 bp, Homo sapiens
ggtgagcactgcgaccagtgccagc

SEQ ID NO: 8857 - DNA, 25 bp, Homo sapiens
gtatgggaactaccagccagggtcc

SEQ ID NO: 8858 - DNA, 25 bp, Homo sapiens
gtcgctcgactgcgacgcaggtgta

SEQ ID NO: 8859 - DNA, 25 bp, Homo sapiens
tccccaacccactggacaggagaga

SEQ ID NO: 8860 - DNA, 25 bp, Homo sapiens
aagacgcactttggcttataattct

SEQ ID NO: 8861 - DNA, 25 bp, Homo sapiens
atgcccagacaaaaagctaatacca

SEQ ID NO: 8862 - DNA, 25 bp, Homo sapiens
cccccagatatcatctacctagatt

SEQ ID NO: 8863 - DNA, 25 bp, Homo sapiens
ctcctcaacaaccccagatagtggc

SEQ ID NO: 8864 - DNA, 25 bp, Homo sapiens
ctgccggcctcgagaggggccgatg

SEQ ID NO: 8865 - DNA, 25 bp, Homo sapiens
gagctaggtggaaaagcctgggttt

SEQ ID NO: 8866 - DNA, 25 bp, Homo sapiens
gcctgggtttggtgtatggtttttg

SEQ ID NO: 8867 - DNA, 25 bp, Homo sapiens
gtttttgagatattaatgcccagac

SEQ ID NO: 8868 - DNA, 25 bp, Homo sapiens
tcaacaaccccagatagtggcggcc

SEQ ID NO: 8869 - DNA, 25 bp, Homo sapiens
tcgagaggggccgatgcccagagac

SEQ ID NO: 8870 - DNA, 25 bp, Homo sapiens
tttatgtatggtgcaatgtgtgtat

SEQ ID NO: 8871 - DNA, 25 bp, Homo sapiens
aagcctctttaatctgttgcctgat

SEQ ID NO: 8872 - DNA, 25 bp, Homo sapiens
aagtgagtgatttttctgtggctaa

SEQ ID NO: 8873 - DNA, 25 bp, Homo sapiens
agaaacaggagcccatttctcttct

SEQ ID NO: 8874 - DNA, 25 bp, Homo sapiens
ctgccaaatgccagcttgaagagtt

SEQ ID NO: 8875 - DNA, 25 bp, Homo sapiens
gagttattgacattctcctgacctc

SEQ ID NO: 8876 - DNA, 25 bp, Homo sapiens
gatcggaagagtgttaccctctttt

SEQ ID NO: 8877 - DNA, 25 bp, Homo sapiens
gattttctctggcatagtcccaaca

SEQ ID NO: 8878 - DNA, 25 bp, Homo sapiens
gggtgactgacaagcctctttaatc

SEQ ID NO: 8879 - DNA, 25 bp, Homo sapiens
gtggtagtgagtaatgtgcccctga

SEQ ID NO: 8880 - DNA, 25 bp, Homo sapiens
taccctcagtgaaaagtgtcttcta

SEQ ID NO: 8881 - DNA, 25 bp, Homo sapiens
tttctgaacctcttagactcttaga

SEQ ID NO: 8882 - DNA, 25 bp, Homo sapiens
atgcaggctgctcctatgttggaaa

SEQ ID NO: 8883 - DNA, 25 bp, Homo sapiens
caacgtcaggatcctgcagctgctc

SEQ ID NO: 8884 - DNA, 25 bp, Homo sapiens
caaggcgctatgtacagcctcctga

SEQ ID NO: 8885 - DNA, 25 bp, Homo sapiens
gactctttttcctctactgagattc

SEQ ID NO: 8886 - DNA, 25 bp, Homo sapiens
gaggcagtgctgtgtggttcctgcc

SEQ ID NO: 8887 - DNA, 25 bp, Homo sapiens
gatcgacctattattggcctagacc

SEQ ID NO: 8888 - DNA, 25 bp, Homo sapiens
gatgggcaggagatggacccgccaa

SEQ ID NO: 8889 - DNA, 25 bp, Homo sapiens
gcatctgcaggtcaagggccgaagc

SEQ ID NO: 8890 - DNA, 25 bp, Homo sapiens
ggaaccagcaactcaacgtcaggat

SEQ ID NO: 8891 - DNA, 25 bp, Homo sapiens
ggacccgccaaatccagaggaggtg

SEQ ID NO: 8892 - DNA, 25 bp, Homo sapiens
tgattgggcctatgcggcccgagca

SEQ ID NO: 8893 - DNA, 25 bp, Homo sapiens
aaagcacaacccttaacttatggag

SEQ ID NO: 8894 - DNA, 25 bp, Homo sapiens
aacacccatgaccctaagtatcact

SEQ ID NO: 8895 - DNA, 25 bp, Homo sapiens
aatatgtccatatctaaccagtgat

SEQ ID NO: 8896 - DNA, 25 bp, Homo sapiens
aatgcctcaacaaagcacaaccctt

SEQ ID NO: 8897 - DNA, 25 bp, Homo sapiens
atgctggctgtctgagggtctgcat

SEQ ID NO: 8898 - DNA, 25 bp, Homo sapiens
atgtcttggtacttgctgctatttt

SEQ ID NO: 8899 - DNA, 25 bp, Homo sapiens
cactcctccctgatgtacagttggg

SEQ ID NO: 8900 - DNA, 25 bp, Homo sapiens
ctaaccagtgattcgagctatattt

SEQ ID NO: 8901 - DNA, 25 bp, Homo sapiens
cttcatttctcttattgctcaatgt

SEQ ID NO: 8902 - DNA, 25 bp, Homo sapiens
gaaactaatgaaagcactcctccct

SEQ ID NO: 8903 - DNA, 25 bp, Homo sapiens
taaagactccattaccttctgtggc

SEQ ID NO: 8904 - DNA, 25 bp, Homo sapiens
aatgctcctagaagtcttaattgtg

SEQ ID NO: 8905 - DNA, 25 bp, Homo sapiens
agtaacgtgctcactgtgtatagga

SEQ ID NO: 8906 - DNA, 25 bp, Homo sapiens
ccccatcccaaggcaagcatgaata

SEQ ID NO: 8907 - DNA, 25 bp, Homo sapiens
ctgtctgtatctttggttatcctgt

SEQ ID NO: 8908 - DNA, 25 bp, Homo sapiens
gcactatggtttgttgcctacctag

SEQ ID NO: 8909 - DNA, 25 bp, Homo sapiens
gcatctataatgtcagcttatccta

SEQ ID NO: 8910 - DNA, 25 bp, Homo sapiens
gcttatcctaaggctgtccacgtac

SEQ ID NO: 8911 - DNA, 25 bp, Homo sapiens
ggctgtccacgtacttaatttactt

SEQ ID NO: 8912 - DNA, 25 bp, Homo sapiens
gtggcatcgcagtctcttagaattt

SEQ ID NO: 8913 - DNA, 25 bp, Homo sapiens
ttgcctacctagctgcatctataat

SEQ ID NO: 8914 - DNA, 25 bp, Homo sapiens
tttggaggtgcttgatctatctaca

SEQ ID NO: 8915 - DNA, 25 bp, Homo sapiens
gcccaggcagctggtggtgggcgct

SEQ ID NO: 8916 - DNA, 25 bp, Homo sapiens
aagacacgcttgtgtcctgggcgat

SEQ ID NO: 8917 - DNA, 25 bp, Homo sapiens
attcggttccagtggtggctggtcc

SEQ ID NO: 8918 - DNA, 25 bp, Homo sapiens
catccctgcaactgccacagcaggt

SEQ ID NO: 8919 - DNA, 25 bp, Homo sapiens
cggaagcttggagttcgctgttgcc

SEQ ID NO: 8920 - DNA, 25 bp, Homo sapiens
gacagggagtacagctgaccgcttc

SEQ ID NO: 8921 - DNA, 25 bp, Homo sapiens
gaccgcttctggagggtgtttctgt

SEQ ID NO: 8922 - DNA, 25 bp, Homo sapiens
gagggcccttcgttaaagacacgct

SEQ ID NO: 8923 - DNA, 25 bp, Homo sapiens
gtgggaccaggaactctactattag

SEQ ID NO: 8924 - DNA, 25 bp, Homo sapiens
tccagtccaggctggacggctgcct

SEQ ID NO: 8925 - DNA, 25 bp, Homo sapiens
ttagagggacgactgccttcaagca

SEQ ID NO: 8926 - DNA, 25 bp, Homo sapiens
tttctgttcttaggactccagtcca

SEQ ID NO: 8927 - DNA, 25 bp, Homo sapiens
aagtgctgatgtcgctggtggtgga

SEQ ID NO: 8928 - DNA, 25 bp, Homo sapiens
atgagtttgacttcactgcggactt

SEQ ID NO: 8929 - DNA, 25 bp, Homo sapiens
ccaagagatgagctccgtggcctac

SEQ ID NO: 8930 - DNA, 25 bp, Homo sapiens
ccctcacttgctggctagtatgcag

SEQ ID NO: 8931 - DNA, 25 bp, Homo sapiens
ctgctatcatcgattcggacccagt

SEQ ID NO: 8932 - DNA, 25 bp, Homo sapiens
gaccgagccaatgagcttccggagc

SEQ ID NO: 8933 - DNA, 25 bp, Homo sapiens
gactttccatctagctgctaatgcc

SEQ ID NO: 8934 - DNA, 25 bp, Homo sapiens
gcaggacccctgcaaaactgggact

SEQ ID NO: 8935 - DNA, 25 bp, Homo sapiens
gtggaactggggttggaccgagcca

SEQ ID NO: 8936 - DNA, 25 bp, Homo sapiens
taccctggggtagcctcaaatggaa

SEQ ID NO: 8937 - DNA, 25 bp, Homo sapiens
tagttcctcgggatctccaataggc

SEQ ID NO: 8938 - DNA, 25 bp, Homo sapiens
aacagggttgccacaccatttggag

SEQ ID NO: 8939 - DNA, 25 bp, Homo sapiens
aaccgaacctacagatgataccact

SEQ ID NO: 8940 - DNA, 25 bp, Homo sapiens
caaagccacttgcatttttcattag

SEQ ID NO: 8941 - DNA, 25 bp, Homo sapiens
cacagctgtccctaagtactatcaa

SEQ ID NO: 8942 - DNA, 25 bp, Homo sapiens
cctttctggcagacggtcctttaat

SEQ ID NO: 8943 - DNA, 25 bp, Homo sapiens
gaaaaattcaacaccacagctgtcc

SEQ ID NO: 8944 - DNA, 25 bp, Homo sapiens
gatcccaggtttatgtcctttgtca

SEQ ID NO: 8945 - DNA, 25 bp, Homo sapiens
gcaatgatccggagcttttagaggc

SEQ ID NO: 8946 - DNA, 25 bp, Homo sapiens
gctactattgctaacagatcccagg

SEQ ID NO: 8947 - DNA, 25 bp, Homo sapiens
gtactatcaatctccctgggaacaa

SEQ ID NO: 8948 - DNA, 25 bp, Homo sapiens
tagtgattttccttttctgacattc

SEQ ID NO: 8949 - DNA, 25 bp, Homo sapiens
aaataacatacgcactcaacttcct

SEQ ID NO: 8950 - DNA, 25 bp, Homo sapiens
aatatctgtcttttaattggtgttt

SEQ ID NO: 8951 - DNA, 25 bp, Homo sapiens
aatgtgtttcttacagactgcatgt

SEQ ID NO: 8952 - DNA, 25 bp, Homo sapiens
acagactgcatgtagttgggtataa

SEQ ID NO: 8953 - DNA, 25 bp, Homo sapiens
acctctaccatgagcaattctcctg

SEQ ID NO: 8954 - DNA, 25 bp, Homo sapiens
actgctacctctaccatgagcaatt

SEQ ID NO: 8955 - DNA, 25 bp, Homo sapiens
atatctttttccatcatgttacttt

SEQ ID NO: 8956 - DNA, 25 bp, Homo sapiens
catcacacctggtcaactttctttt

SEQ ID NO: 8957 - DNA, 25 bp, Homo sapiens
cttgacagactctcgttctgtggcc

SEQ ID NO: 8958 - DNA, 25 bp, Homo sapiens
gttgggtataatttttatccagtct

SEQ ID NO: 8959 - DNA, 25 bp, Homo sapiens
tcaccacattcgtcaggttggtttc

SEQ ID NO: 8960 - DNA, 25 bp, Homo sapiens
aagcctggcccataatgtgaacata

SEQ ID NO: 8961 - DNA, 25 bp, Homo sapiens
aagtaatcactaatgctcaacaatt

SEQ ID NO: 8962 - DNA, 25 bp, Homo sapiens
cttactgcccaggcctatctggaag

SEQ ID NO: 8963 - DNA, 25 bp, Homo sapiens
gaaatggatgtaagcctggcccata

SEQ ID NO: 8964 - DNA, 25 bp, Homo sapiens
gagatggagtgagctgagacagata

SEQ ID NO: 8965 - DNA, 25 bp, Homo sapiens
gatttttggcactttgttttcaaga

SEQ ID NO: 8966 - DNA, 25 bp, Homo sapiens
gctcaacaatttatccattcaatca

SEQ ID NO: 8967 - DNA, 25 bp, Homo sapiens
gggagttaggaccaccaatggattg

SEQ ID NO: 8968 - DNA, 25 bp, Homo sapiens
ttcattgggttgtcagatagtctat

SEQ ID NO: 8969 - DNA, 25 bp, Homo sapiens
tttagattattccaagccttatttt

SEQ ID NO: 8970 - DNA, 25 bp, Homo sapiens
ttttctgcctaatagtaactggtta

SEQ ID NO: 8971 - DNA, 25 bp, Homo sapiens
acctcagctccagaagcctaaattt

SEQ ID NO: 8972 - DNA, 25 bp, Homo sapiens
atgaagtcttttattctcctcgatc

SEQ ID NO: 8973 - DNA, 25 bp, Homo sapiens
cctgctgacagattactcacctcag

SEQ ID NO: 8974 - DNA, 25 bp, Homo sapiens
gaatcgtacgatatgctttgccatt

SEQ ID NO: 8975 - DNA, 25 bp, Homo sapiens
gctccaagctttccaaggttaccaa

SEQ ID NO: 8976 - DNA, 25 bp, Homo sapiens
gcttaaactctctaattcccaattt

SEQ ID NO: 8977 - DNA, 25 bp, Homo sapiens
tcctcgatcactagtgttcccagag

SEQ ID NO: 8978 - DNA, 25 bp, Homo sapiens
tgaagactgctaaagttgctgcctc

SEQ ID NO: 8979 - DNA, 25 bp, Homo sapiens
tggacatttttacactgcttgccca

SEQ ID NO: 8980 - DNA, 25 bp, Homo sapiens
tgtgaaactttccttaagccttcaa

SEQ ID NO: 8981 - DNA, 25 bp, Homo sapiens
ttgctgcctctgactggacattttt

SEQ ID NO: 8982 - DNA, 25 bp, Homo sapiens
aaactgcagctgtgagtgcgtgtgt

SEQ ID NO: 8983 - DNA, 25 bp, Homo sapiens
aaggcattccacacctaagaactag

SEQ ID NO: 8984 - DNA, 25 bp, Homo sapiens
accatttacatgcaccttatatttc

SEQ ID NO: 8985 - DNA, 25 bp, Homo sapiens
cccaagtgaaggttcccgaggacat

SEQ ID NO: 8986 - DNA, 25 bp, Homo sapiens
ctgccttgtttatagccacttgtga

SEQ ID NO: 8987 - DNA, 25 bp, Homo sapiens
ggggctggaatgctgggtatgctct

SEQ ID NO: 8988 - DNA, 25 bp, Homo sapiens
gggtatgaaagtgcctgccttgttt

SEQ ID NO: 8989 - DNA, 25 bp, Homo sapiens
ggtctgtttgccacttgatggggcc

SEQ ID NO: 8990 - DNA, 25 bp, Homo sapiens
gtagccctgggtttaatgtcaaatc

SEQ ID NO: 8991 - DNA, 25 bp, Homo sapiens
gtgtacacatctattctcaaagcta

SEQ ID NO: 8992 - DNA, 25 bp, Homo sapiens
tgctctgtgacaaggctacgctgac

SEQ ID NO: 8993 - DNA, 25 bp, Homo sapiens
agagaggcaaggttgccctttcctt

SEQ ID NO: 8994 - DNA, 25 bp, Homo sapiens
attgctacctctaatagtcctgtct

SEQ ID NO: 8995 - DNA, 25 bp, Homo sapiens
cacccccagttcagtctgtagggag

SEQ ID NO: 8996 - DNA, 25 bp, Homo sapiens
cctcaggaaggacatgggtgccccc

SEQ ID NO: 8997 - DNA, 25 bp, Homo sapiens
cctgtctccctagggaattcctgct

SEQ ID NO: 8998 - DNA, 25 bp, Homo sapiens
ccttgggtgacacctccgagaggca

SEQ ID NO: 8999 - DNA, 25 bp, Homo sapiens
ggagttgttcggcatcacaggtagc

SEQ ID NO: 9000 - DNA, 25 bp, Homo sapiens
ggataggccatctggggtctatgcc

SEQ ID NO: 9001 - DNA, 25 bp, Homo sapiens
gggaccaagcgaccaaggataggcc

SEQ ID NO: 9002 - DNA, 25 bp, Homo sapiens
tatgacagctggctagcattcctca

SEQ ID NO: 9003 - DNA, 25 bp, Homo sapiens
tggggagaaatccctcagatcccac

SEQ ID NO: 9004 - DNA, 25 bp, Homo sapiens
aagaatgcccatctgtgaacacatg

SEQ ID NO: 9005 - DNA, 25 bp, Homo sapiens
catggtagagtctccaacctgttcc

SEQ ID NO: 9006 - DNA, 25 bp, Homo sapiens
ccgccagtgggtaatcgccctggcc

SEQ ID NO: 9007 - DNA, 25 bp, Homo sapiens
cctttctcaagaatgcccatctgtg

SEQ ID NO: 9008 - DNA, 25 bp, Homo sapiens
cggcactgatgggctcacatatacg

SEQ ID NO: 9009 - DNA, 25 bp, Homo sapiens
ctgccctccttgttgtggacaggga

SEQ ID NO: 9010 - DNA, 25 bp, Homo sapiens
gaacacatggtagagtctccaacct

SEQ ID NO: 9011 - DNA, 25 bp, Homo sapiens
gaatgaatgccagctctgcttggcc

SEQ ID NO: 9012 - DNA, 25 bp, Homo sapiens
gggctcacatatacgaatgaatgcc

SEQ ID NO: 9013 - DNA, 25 bp, Homo sapiens
tgttcccagatgtccaacctggtct

SEQ ID NO: 9014 - DNA, 25 bp, Homo sapiens
ttgttgtggacagggaagtgccagt

SEQ ID NO: 9015 - DNA, 25 bp, Homo sapiens
aacaatattcaccaattcccaggat

SEQ ID NO: 9016 - DNA, 25 bp, Homo sapiens
aagagcctgcgcaaatgctgtcacc

SEQ ID NO: 9017 - DNA, 25 bp, Homo sapiens
aggccactgacatcgtgacaggtct

SEQ ID NO: 9018 - DNA, 25 bp, Homo sapiens
agttttctacaatagctacctccca

SEQ ID NO: 9019 - DNA, 25 bp, Homo sapiens
atctgcattttgtctctttgtatct

SEQ ID NO: 9020 - DNA, 25 bp, Homo sapiens
cccctttgcttctatcttgaaatcc

SEQ ID NO: 9021 - DNA, 25 bp, Homo sapiens
cctcccaccccaagtctgtagtggg

SEQ ID NO: 9022 - DNA, 25 bp, Homo sapiens
gtgcagaccacaacctcaaaacaaa

SEQ ID NO: 9023 - DNA, 25 bp, Homo sapiens
tgaagtggatggtccctttggcaca

SEQ ID NO: 9024 - DNA, 25 bp, Homo sapiens
tgctgtcaccgatattccagtctgg

SEQ ID NO: 9025 - DNA, 25 bp, Homo sapiens
tggagcaggaattggggtcaccccc

SEQ ID NO: 9026 - DNA, 25 bp, Homo sapiens
ccttttctggtttcgtgttcaccat

SEQ ID NO: 9027 - DNA, 25 bp, Homo sapiens
gaaccgttcgtttgcaatctacagc

SEQ ID NO: 9028 - DNA, 25 bp, Homo sapiens
gaagggtgcagcaggctcaaaggca

SEQ ID NO: 9029 - DNA, 25 bp, Homo sapiens
gaccaactgacgtatgtttcccttt

SEQ ID NO: 9030 - DNA, 25 bp, Homo sapiens
gacccagacatattgtactctttct

SEQ ID NO: 9031 - DNA, 25 bp, Homo sapiens
gcataagtcattccaatcagccaac

SEQ ID NO: 9032 - DNA, 25 bp, Homo sapiens
gccaactaagttgtccttttctggt

SEQ ID NO: 9033 - DNA, 25 bp, Homo sapiens
gtatcatgtctcctttaactagcat

SEQ ID NO: 9034 - DNA, 25 bp, Homo sapiens
gtgtcttcagcagtgttcagagcca

SEQ ID NO: 9035 - DNA, 25 bp, Homo sapiens
gttaatccttctatcttgaatcttc

SEQ ID NO: 9036 - DNA, 25 bp, Homo sapiens
taactagcataccccgaagtggaga

SEQ ID NO: 9037 - DNA, 25 bp, Homo sapiens
accacagactttagctttctgagca

SEQ ID NO: 9038 - DNA, 25 bp, Homo sapiens
agatttttatgcctgtgacttcctt

SEQ ID NO: 9039 - DNA, 25 bp, Homo sapiens
caagcctatagtgtccccacaaaaa

SEQ ID NO: 9040 - DNA, 25 bp, Homo sapiens
cccccggagcttccaaaacaagcag

SEQ ID NO: 9041 - DNA, 25 bp, Homo sapiens
gagcacacttgttagcgaatcctcc

SEQ ID NO: 9042 - DNA, 25 bp, Homo sapiens
gagcatggaagagacggagcacact

SEQ ID NO: 9043 - DNA, 25 bp, Homo sapiens
gcactgcattcgcacaaactgcttc

SEQ ID NO: 9044 - DNA, 25 bp, Homo sapiens
gcagccggaggagcagtatgagcat

SEQ ID NO: 9045 - DNA, 25 bp, Homo sapiens
gggactgaggccaaccaagcctata

SEQ ID NO: 9046 - DNA, 25 bp, Homo sapiens
tatgcctgtgacttccttggaaatc

SEQ ID NO: 9047 - DNA, 25 bp, Homo sapiens
ttcatgctttatcaatagcccagga

SEQ ID NO: 9048 - DNA, 25 bp, Homo sapiens
aacccacgagtggcactgaggggcc

SEQ ID NO: 9049 - DNA, 25 bp, Homo sapiens
aacctcctgttagctgttatttcta

SEQ ID NO: 9050 - DNA, 25 bp, Homo sapiens
aatgaggaaactccaaacctcctgt

SEQ ID NO: 9051 - DNA, 25 bp, Homo sapiens
acattcgagcaatatcaattcctat

SEQ ID NO: 9052 - DNA, 25 bp, Homo sapiens
atatgacgtcattgccagcacctac

SEQ ID NO: 9053 - DNA, 25 bp, Homo sapiens
attctgtcaatggtcctgcaagtcc

SEQ ID NO: 9054 - DNA, 25 bp, Homo sapiens
attgtgttaatccacttggtgcccc

SEQ ID NO: 9055 - DNA, 25 bp, Homo sapiens
gaacagtttgtacagacgtatgctt

SEQ ID NO: 9056 - DNA, 25 bp, Homo sapiens
gaaggttctgaacccacgagtggca

SEQ ID NO: 9057 - DNA, 25 bp, Homo sapiens
gtccagctttaaatcaaggttcata

SEQ ID NO: 9058 - DNA, 25 bp, Homo sapiens
tgccccagaaaagctccctgaagca

SEQ ID NO: 9059 - DNA, 25 bp, Homo sapiens
aatacacacagttatgccgctagat

SEQ ID NO: 9060 - DNA, 25 bp, Homo sapiens
agctctgtcacttaattgctacatg

SEQ ID NO: 9061 - DNA, 25 bp, Homo sapiens
gaccaccagagcaggtatagactcc

SEQ ID NO: 9062 - DNA, 25 bp, Homo sapiens
gatctagagccagttactttgtgtt

SEQ ID NO: 9063 - DNA, 25 bp, Homo sapiens
gctccagtcaggcctatctaaactg

SEQ ID NO: 9064 - DNA, 25 bp, Homo sapiens
ggaataaactccatttagtcacaaa

SEQ ID NO: 9065 - DNA, 25 bp, Homo sapiens
gtgtgtagtcttacgatgtttagta

SEQ ID NO: 9066 - DNA, 25 bp, Homo sapiens
taaactggattcacagctctgtcac

SEQ ID NO: 9067 - DNA, 25 bp, Homo sapiens
tgccgctagatacatgctttttaat

SEQ ID NO: 9068 - DNA, 25 bp, Homo sapiens
tgtgtttcagccatgtatttgcagc

SEQ ID NO: 9069 - DNA, 25 bp, Homo sapiens
tttttcttaccttattgcactggtt

SEQ ID NO: 9070 - DNA, 25 bp, Homo sapiens
aacctactaaacgtgagttgctgtg

SEQ ID NO: 9071 - DNA, 25 bp, Homo sapiens
aagctaccaaacacactgctcagaa

SEQ ID NO: 9072 - DNA, 25 bp, Homo sapiens
actttcaggaagtggaactcatttt

SEQ ID NO: 9073 - DNA, 25 bp, Homo sapiens
agatcagaaagctaccaaacacact

SEQ ID NO: 9074 - DNA, 25 bp, Homo sapiens
atggaagctccagattgacagaata

SEQ ID NO: 9075 - DNA, 25 bp, Homo sapiens
ccaggaatggccgcgcatggtggct

SEQ ID NO: 9076 - DNA, 25 bp, Homo sapiens
gacagaaaggccctgctatgatagc

SEQ ID NO: 9077 - DNA, 25 bp, Homo sapiens
gacagaatatgtgccatctctgaca

SEQ ID NO: 9078 - DNA, 25 bp, Homo sapiens
gacattcgaagactgcgggactttc

SEQ ID NO: 9079 - DNA, 25 bp, Homo sapiens
gtgccatctctgacagaaaggccct

SEQ ID NO: 9080 - DNA, 25 bp, Homo sapiens
taaatactcccaggaatggccgcgc

SEQ ID NO: 9081 - DNA, 25 bp, Homo sapiens
atttcccctaatcttttctgaatct

SEQ ID NO: 9082 - DNA, 25 bp, Homo sapiens
ccaacagctgcgttaatccgtttct

SEQ ID NO: 9083 - DNA, 25 bp, Homo sapiens
ctggccttcatcatttggtgccttc

SEQ ID NO: 9084 - DNA, 25 bp, Homo sapiens
gaaaccggttccaacagaagctccg

SEQ ID NO: 9085 - DNA, 25 bp, Homo sapiens
gaacaggataacccgtgaccaagtc

SEQ ID NO: 9086 - DNA, 25 bp, Homo sapiens
gaagctccgcagtgtgtttagggtt

SEQ ID NO: 9087 - DNA, 25 bp, Homo sapiens
gtgactttcaggaatgcccattgtt

SEQ ID NO: 9088 - DNA, 25 bp, Homo sapiens
tagcagtcattgacctggcacttcc

SEQ ID NO: 9089 - DNA, 25 bp, Homo sapiens
tagggttccaattacttggctccaa

SEQ ID NO: 9090 - DNA, 25 bp, Homo sapiens
tggctacttgctttgaggctcacca

SEQ ID NO: 9091 - DNA, 25 bp, Homo sapiens
ttgccatcctcttgggattcaccaa

SEQ ID NO: 9092 - DNA, 25 bp, Homo sapiens
attgctccaaggtattccagttttc

SEQ ID NO: 9093 - DNA, 25 bp, Homo sapiens
attgtacccactgtcagcggatttc

SEQ ID NO: 9094 - DNA, 25 bp, Homo sapiens
cacaattttaggaagtctcccctct

SEQ ID NO: 9095 - DNA, 25 bp, Homo sapiens
cgagcatagcacctgtcattgtacc

SEQ ID NO: 9096 - DNA, 25 bp, Homo sapiens
ctcttcagcactcattgtgtctctg

SEQ ID NO: 9097 - DNA, 25 bp, Homo sapiens
gccttacctcaattccggctatatc

SEQ ID NO: 9098 - DNA, 25 bp, Homo sapiens
gcggatttcttcttagtcaggaccc

SEQ ID NO: 9099 - DNA, 25 bp, Homo sapiens
gctgtttgccgttaacctgttagga

SEQ ID NO: 9100 - DNA, 25 bp, Homo sapiens
ggctatatcacagcaactgccttgc

SEQ ID NO: 9101 - DNA, 25 bp, Homo sapiens
ttaggactactcttctacctcatat

SEQ ID NO: 9102 - DNA, 25 bp, Homo sapiens
ttgctgacgctctcttgcggattaa

SEQ ID NO: 9103 - DNA, 25 bp, Homo sapiens
acagagatatgcacacacacggatg

SEQ ID NO: 9104 - DNA, 25 bp, Homo sapiens
acttttctggttcttatccattatc

SEQ ID NO: 9105 - DNA, 25 bp, Homo sapiens
atgcacacacagatggtcacacaga

SEQ ID NO: 9106 - DNA, 25 bp, Homo sapiens
atgcacacaccgatgtgcgcacaca

SEQ ID NO: 9107 - DNA, 25 bp, Homo sapiens
cacaccgatgcacacgcacatagag

SEQ ID NO: 9108 - DNA, 25 bp, Homo sapiens
caccgatgctgactccatgtgtgct

SEQ ID NO: 9109 - DNA, 25 bp, Homo sapiens
gcacgcacacatcagtgcacacgga

SEQ ID NO: 9110 - DNA, 25 bp, Homo sapiens
gcttcccagcttcacaataaacggc

SEQ ID NO: 9111 - DNA, 25 bp, Homo sapiens
tatcatcttcacttcagacaattca

SEQ ID NO: 9112 - DNA, 25 bp, Homo sapiens
tgaaggcggttgtttagctctcact

SEQ ID NO: 9113 - DNA, 25 bp, Homo sapiens
tggatgcacgcacatgccaatgcac

SEQ ID NO: 9114 - DNA, 25 bp, Homo sapiens
aatgccctgttgagagtagccttgc

SEQ ID NO: 9115 - DNA, 25 bp, Homo sapiens
atcttgtccgtgtgggcacacactg

SEQ ID NO: 9116 - DNA, 25 bp, Homo sapiens
cactggattaattttcaccggaaca

SEQ ID NO: 9117 - DNA, 25 bp, Homo sapiens
ccactgtggatatctaatgccctgt

SEQ ID NO: 9118 - DNA, 25 bp, Homo sapiens
gagcagctgcacatcgtgaaagact

SEQ ID NO: 9119 - DNA, 25 bp, Homo sapiens
gccccaaagttctatacagcatttc

SEQ ID NO: 9120 - DNA, 25 bp, Homo sapiens
gccttgctcagtactaaaatgcccc

SEQ ID NO: 9121 - DNA, 25 bp, Homo sapiens
ggaacaattgcgaattctctctgcc

SEQ ID NO: 9122 - DNA, 25 bp, Homo sapiens
taatgtatgacgctccactgtggat

SEQ ID NO: 9123 - DNA, 25 bp, Homo sapiens
tgagtgttgagttgccgtgtggagt

SEQ ID NO: 9124 - DNA, 25 bp, Homo sapiens
ttatagcattcaaacctcacatcct

SEQ ID NO: 9125 - DNA, 25 bp, Homo sapiens
acgtgggctactgggtggccatgtt

SEQ ID NO: 9126 - DNA, 25 bp, Homo sapiens
cccgagccacgaacttgctgggtgg

SEQ ID NO: 9127 - DNA, 25 bp, Homo sapiens
ccgcctcaagggtcttcaggggagg

SEQ ID NO: 9128 - DNA, 25 bp, Homo sapiens
gccagggccgactggagcggccctt

SEQ ID NO: 9129 - DNA, 25 bp, Homo sapiens
gcggaagctggccgctaactacgtc

SEQ ID NO: 9130 - DNA, 25 bp, Homo sapiens
ggccatgttgacgctgtactgggtg

SEQ ID NO: 9131 - DNA, 25 bp, Homo sapiens
gtcagcccaagattcttcagtctgg

SEQ ID NO: 9132 - DNA, 25 bp, Homo sapiens
taatctccatttctactgtgtgatc

SEQ ID NO: 9133 - DNA, 25 bp, Homo sapiens
tattgggactgggacttctgggtct

SEQ ID NO: 9134 - DNA, 25 bp, Homo sapiens
tctcctcgttcttatttaatctcca

SEQ ID NO: 9135 - DNA, 25 bp, Homo sapiens
tttccctcctctgccaaacgagggg

SEQ ID NO: 9136 - DNA, 25 bp, Homo sapiens
cctaccggcaatttccggccaacag

SEQ ID NO: 9137 - DNA, 25 bp, Homo sapiens
cttctctcacctcctaaagtagact

SEQ ID NO: 9138 - DNA, 25 bp, Homo sapiens
gacgtgggcggcagagaggactgtt

SEQ ID NO: 9139 - DNA, 25 bp, Homo sapiens
gcacgtagtagggtcaggccacggc

SEQ ID NO: 9140 - DNA, 25 bp, Homo sapiens
ggactgttgacatccaagcttcctt

SEQ ID NO: 9141 - DNA, 25 bp, Homo sapiens
tagagtccaacgtggggcagcacag

SEQ ID NO: 9142 - DNA, 25 bp, Homo sapiens
tcccctaatgcctgcggagttgtgc

SEQ ID NO: 9143 - DNA, 25 bp, Homo sapiens
tgccatggaggcacacagctgcaga

SEQ ID NO: 9144 - DNA, 25 bp, Homo sapiens
tggtatgtgacatgcgggctgggca

SEQ ID NO: 9145 - DNA, 25 bp, Homo sapiens
tgtgtgaagatcacgttccttcccc

SEQ ID NO: 9146 - DNA, 25 bp, Homo sapiens
ttgcccctgttacctaattagagca

SEQ ID NO: 9147 - DNA, 25 bp, Homo sapiens
agaacttaagactcagcctaaattt

SEQ ID NO: 9148 - DNA, 25 bp, Homo sapiens
cactcttgagtttgacataggcctg

SEQ ID NO: 9149 - DNA, 25 bp, Homo sapiens
cagccctgaggtccatgggttgact

SEQ ID NO: 9150 - DNA, 25 bp, Homo sapiens
gaatgtatatgagaaacccccactc

SEQ ID NO: 9151 - DNA, 25 bp, Homo sapiens
gacataggcctgccttatctgtggt

SEQ ID NO: 9152 - DNA, 25 bp, Homo sapiens
gagactagcaccttgaatatgccag

SEQ ID NO: 9153 - DNA, 25 bp, Homo sapiens
gcattaggctgcaactctgatatac

SEQ ID NO: 9154 - DNA, 25 bp, Homo sapiens
gtccatgggttgacttatgctcaca

SEQ ID NO: 9155 - DNA, 25 bp, Homo sapiens
gtttcgtttgctcaacatggtttac

SEQ ID NO: 9156 - DNA, 25 bp, Homo sapiens
tccatgaaagaattgcagccctgag

SEQ ID NO: 9157 - DNA, 25 bp, Homo sapiens
tttggacaactagccctgatgcatt

SEQ ID NO: 9158 - DNA, 25 bp, Homo sapiens
atccagtcttttgccctagaaggta

SEQ ID NO: 9159 - DNA, 25 bp, Homo sapiens
atgcctcttccaggtgtttttggtg

SEQ ID NO: 9160 - DNA, 25 bp, Homo sapiens
cagccatcagccatgagggtcttgt

SEQ ID NO: 9161 - DNA, 25 bp, Homo sapiens
ctccctcatcagagacgtgcgacat

SEQ ID NO: 9162 - DNA, 25 bp, Homo sapiens
ggagccatatgtcatccagtctttt

SEQ ID NO: 9163 - DNA, 25 bp, Homo sapiens
ggtctccctggaacaaaatgctgca

SEQ ID NO: 9164 - DNA, 25 bp, Homo sapiens
taaacaaattggcacctgtggtctc

SEQ ID NO: 9165 - DNA, 25 bp, Homo sapiens
tacctgccttaagagtggagccata

SEQ ID NO: 9166 - DNA, 25 bp, Homo sapiens
tataggcgatcctgttacctgcctt

SEQ ID NO: 9167 - DNA, 25 bp, Homo sapiens
tgcggattcagaaagggctccctca

SEQ ID NO: 9168 - DNA, 25 bp, Homo sapiens
tgctgtggctgatgcggattcagaa

SEQ ID NO: 9169 - DNA, 25 bp, Homo sapiens
aaatctactgccatagttcacatac

SEQ ID NO: 9170 - DNA, 25 bp, Homo sapiens
aaggagactttgccataattttcag

SEQ ID NO: 9171 - DNA, 25 bp, Homo sapiens
aatatctggtctctcacttcaggaa

SEQ ID NO: 9172 - DNA, 25 bp, Homo sapiens
cagcctgacagtgctagtctctgtt

SEQ ID NO: 9173 - DNA, 25 bp, Homo sapiens
ctagaaggtgtgccaagccatttga

SEQ ID NO: 9174 - DNA, 25 bp, Homo sapiens
gaaaatggaatccctgacagctgtg

SEQ ID NO: 9175 - DNA, 25 bp, Homo sapiens
gacagctgtgtccgtatcaagcatc

SEQ ID NO: 9176 - DNA, 25 bp, Homo sapiens
gatgtttcccaaacactgtttacag

SEQ ID NO: 9177 - DNA, 25 bp, Homo sapiens
gcatcagtctctcaaacagttgccc

SEQ ID NO: 9178 - DNA, 25 bp, Homo sapiens
gtcagagttctagtccctaatttta

SEQ ID NO: 9179 - DNA, 25 bp, Homo sapiens
ttcactttatttatcctgcagtcac

SEQ ID NO: 9180 - DNA, 25 bp, Homo sapiens
aagcaattggatcacaacctcacct

SEQ ID NO: 9181 - DNA, 25 bp, Homo sapiens
agctattcacatcattgcacacctg

SEQ ID NO: 9182 - DNA, 25 bp, Homo sapiens
cctgtttgtggatgccttcctgaaa

SEQ ID NO: 9183 - DNA, 25 bp, Homo sapiens
ctcattttgcagccgcacactgaga

SEQ ID NO: 9184 - DNA, 25 bp, Homo sapiens
cttgggtcaacattggcctgtgccc

SEQ ID NO: 9185 - DNA, 25 bp, Homo sapiens
gaagccgacaggccacagatggctc

SEQ ID NO: 9186 - DNA, 25 bp, Homo sapiens
ggggttcttggctaaatcccatcca

SEQ ID NO: 9187 - DNA, 25 bp, Homo sapiens
ggtggcctatatgatctgcctacat

SEQ ID NO: 9188 - DNA, 25 bp, Homo sapiens
gtctgctctctgcttgaattttaac

SEQ ID NO: 9189 - DNA, 25 bp, Homo sapiens
tcaccttccacaagctggtggccta

SEQ ID NO: 9190 - DNA, 25 bp, Homo sapiens
tctctccagcctatctcatgatgag

SEQ ID NO: 9191 - DNA, 25 bp, Homo sapiens
aaggacaccgggatgtgcagcgtac

SEQ ID NO: 9192 - DNA, 25 bp, Homo sapiens
attggcatcagcttcatgggcaact

SEQ ID NO: 9193 - DNA, 25 bp, Homo sapiens
catccagaattggccacactaccgc

SEQ ID NO: 9194 - DNA, 25 bp, Homo sapiens
ctgcccttacgctatgtggtggtat

SEQ ID NO: 9195 - DNA, 25 bp, Homo sapiens
cttcgactcggagcggctcaggaga

SEQ ID NO: 9196 - DNA, 25 bp, Homo sapiens
gagccctgaggtccaactatgtgct

SEQ ID NO: 9197 - DNA, 25 bp, Homo sapiens
gccccggaacgagtggaaggccctg

SEQ ID NO: 9198 - DNA, 25 bp, Homo sapiens
gtgcccactcaggtcacttatggaa

SEQ ID NO: 9199 - DNA, 25 bp, Homo sapiens
tacgagggccgtggctggaacttca

SEQ ID NO: 9200 - DNA, 25 bp, Homo sapiens
tgaagacactgggctggtgcgacgt

SEQ ID NO: 9201 - DNA, 25 bp, Homo sapiens
tgcggtgtggctcagggagccctga

SEQ ID NO: 9202 - DNA, 25 bp, Homo sapiens
aaacatcttttcacaacttaccttg

SEQ ID NO: 9203 - DNA, 25 bp, Homo sapiens
agcacgcaacatggcacatgtgtat

SEQ ID NO: 9204 - DNA, 25 bp, Homo sapiens
atgactgaaagatgggactcctcct

SEQ ID NO: 9205 - DNA, 25 bp, Homo sapiens
gaaacaacttctagtattggatctg

SEQ ID NO: 9206 - DNA, 25 bp, Homo sapiens
gacgagttactggatgcagcacgca

SEQ ID NO: 9207 - DNA, 25 bp, Homo sapiens
gactcctcctttatttcagcatgga

SEQ ID NO: 9208 - DNA, 25 bp, Homo sapiens
gaggatttcctttttcctgtgacaa

SEQ ID NO: 9209 - DNA, 25 bp, Homo sapiens
ggatgtgatagcattcctgctggcc

SEQ ID NO: 9210 - DNA, 25 bp, Homo sapiens
tacatatgtagctaacccttcgttg

SEQ ID NO: 9211 - DNA, 25 bp, Homo sapiens
tggcctgcgtggcaactgtgatatt

SEQ ID NO: 9212 - DNA, 25 bp, Homo sapiens
ttgcctgttttgtttccgaaagctt

SEQ ID NO: 9213 - DNA, 25 bp, Homo sapiens
atgcctgtgtacaacaatgctttga

SEQ ID NO: 9214 - DNA, 25 bp, Homo sapiens
cggctttaactatcttctctatatt

SEQ ID NO: 9215 - DNA, 25 bp, Homo sapiens
gaaaactctatgtccggctttaact

SEQ ID NO: 9216 - DNA, 25 bp, Homo sapiens
gactcgagtgtttaaatgcctgtgt

SEQ ID NO: 9217 - DNA, 25 bp, Homo sapiens
gagttatcagctctatgtcaattga

SEQ ID NO: 9218 - DNA, 25 bp, Homo sapiens
gattatcttgatttcccaaaaacac

SEQ ID NO: 9219 - DNA, 25 bp, Homo sapiens
gctttttatcgctaaatgacttgca

SEQ ID NO: 9220 - DNA, 25 bp, Homo sapiens
ggtagtttttctgtcattgttaaat

SEQ ID NO: 9221 - DNA, 25 bp, Homo sapiens
gttgctgaaaactctatgtccggct

SEQ ID NO: 9222 - DNA, 25 bp, Homo sapiens
taagtgcagcttgacattatgtttt

SEQ ID NO: 9223 - DNA, 25 bp, Homo sapiens
tagccatttggaagctttggttatg

SEQ ID NO: 9224 - DNA, 25 bp, Homo sapiens
aaacagcggctacctggagatcacc

SEQ ID NO: 9225 - DNA, 25 bp, Homo sapiens
acacactgggaaccctacactacgg

SEQ ID NO: 9226 - DNA, 25 bp, Homo sapiens
accctacgggtgactctgaggcccg

SEQ ID NO: 9227 - DNA, 25 bp, Homo sapiens
caacatgggcgactcggctgtgccc

SEQ ID NO: 9228 - DNA, 25 bp, Homo sapiens
caacgggtgactctcaggatgcccc

SEQ ID NO: 9229 - DNA, 25 bp, Homo sapiens
caccttgggtgacactgaggctgcc

SEQ ID NO: 9230 - DNA, 25 bp, Homo sapiens
cattagtttctagtgtcccatcagc

SEQ ID NO: 9231 - DNA, 25 bp, Homo sapiens
cccccacagatgactccgaggaagc

SEQ ID NO: 9232 - DNA, 25 bp, Homo sapiens
ctcacaagtgactctgaggctcccc

SEQ ID NO: 9233 - DNA, 25 bp, Homo sapiens
gacagtctctaaggccatgaccgcc

SEQ ID NO: 9234 - DNA, 25 bp, Homo sapiens
gcctactggaccaactttgccaaaa

SEQ ID NO: 9235 - DNA, 25 bp, Homo sapiens
aacaggaggcattctgtggccagcc

SEQ ID NO: 9236 - DNA, 25 bp, Homo sapiens
aagcctacatgacacagttggattt

SEQ ID NO: 9237 - DNA, 25 bp, Homo sapiens
acagtgcatttgccttgtcacctgt

SEQ ID NO: 9238 - DNA, 25 bp, Homo sapiens
atggccaagcaattcctctgaacaa

SEQ ID NO: 9239 - DNA, 25 bp, Homo sapiens
ctcccctgtttgacgacagtgcatt

SEQ ID NO: 9240 - DNA, 25 bp, Homo sapiens
gcattgttaatcatccatcacttcc

SEQ ID NO: 9241 - DNA, 25 bp, Homo sapiens
gccagccaaaaggtaccccgatggc

SEQ ID NO: 9242 - DNA, 25 bp, Homo sapiens
gtcacctgtgagctggagagaaccc

SEQ ID NO: 9243 - DNA, 25 bp, Homo sapiens
tcgacctgatgcagagccttctgag

SEQ ID NO: 9244 - DNA, 25 bp, Homo sapiens
tctgcccttcagaagactcgttttt

SEQ ID NO: 9245 - DNA, 25 bp, Homo sapiens
tctgcttgatcaattcccttgaata

SEQ ID NO: 9246 - DNA, 25 bp, Homo sapiens
aaagtagaaatccctgcactcatca

SEQ ID NO: 9247 - DNA, 25 bp, Homo sapiens
aagctttgcctgagaccatcgagga

SEQ ID NO: 9248 - DNA, 25 bp, Homo sapiens
acctaggtctacagccagtggagtc

SEQ ID NO: 9249 - DNA, 25 bp, Homo sapiens
cagatcctgccaaattcttccagct

SEQ ID NO: 9250 - DNA, 25 bp, Homo sapiens
ctcactttattctcagcattcctag

SEQ ID NO: 9251 - DNA, 25 bp, Homo sapiens
gaagagagaccgttgctgctgtcat

SEQ ID NO: 9252 - DNA, 25 bp, Homo sapiens
gctgctgtcatgacctagctttgat

SEQ ID NO: 9253 - DNA, 25 bp, Homo sapiens
gggagaggagcatctattttcttaa

SEQ ID NO: 9254 - DNA, 25 bp, Homo sapiens
gtgctgttgcttccagaaactaaag

SEQ ID NO: 9255 - DNA, 25 bp, Homo sapiens
tcacaaagcccatacaactcaacca

SEQ ID NO: 9256 - DNA, 25 bp, Homo sapiens
tgagccctatcaacctaggtctaca

SEQ ID NO: 9257 - DNA, 25 bp, Homo sapiens
aaactcggagtggcagactgacaac

SEQ ID NO: 9258 - DNA, 25 bp, Homo sapiens
aaccaggaaatgcatggatctcaaa

SEQ ID NO: 9259 - DNA, 25 bp, Homo sapiens
aactgtgagacatgcacttgctacg

SEQ ID NO: 9260 - DNA, 25 bp, Homo sapiens
acaaacacccaataaactcggagtg

SEQ ID NO: 9261 - DNA, 25 bp, Homo sapiens
acatgcacttgctacgaaacagaaa

SEQ ID NO: 9262 - DNA, 25 bp, Homo sapiens
cggagtggcagactgacaactgtga

SEQ ID NO: 9263 - DNA, 25 bp, Homo sapiens
gtacctgtctataaggagtcctgct

SEQ ID NO: 9264 - DNA, 25 bp, Homo sapiens
gtgagacatgcacttgctacgaaac

SEQ ID NO: 9265 - DNA, 25 bp, Homo sapiens
gtggcagactgacaactgtgagaca

SEQ ID NO: 9266 - DNA, 25 bp, Homo sapiens
taaggagtcctgcttatcacaatga

SEQ ID NO: 9267 - DNA, 25 bp, Homo sapiens
tgcacttgctacgaaacagaaattt

SEQ ID NO: 9268 - DNA, 25 bp, Homo sapiens
agcagaagattccgctgtgggggca

SEQ ID NO: 9269 - DNA, 25 bp, Homo sapiens
cagctgggaagccaagcatggccct

SEQ ID NO: 9270 - DNA, 25 bp, Homo sapiens
cttgggctgaaggaagctccagact

SEQ ID NO: 9271 - DNA, 25 bp, Homo sapiens
gaagatgagccgtaacagcagcctc

SEQ ID NO: 9272 - DNA, 25 bp, Homo sapiens
gatgagccgtaacagcagcctcggc

SEQ ID NO: 9273 - DNA, 25 bp, Homo sapiens
gggggcaataagaagcgcaggcaaa

SEQ ID NO: 9274 - DNA, 25 bp, Homo sapiens
tggggccagctgggaagccaagcat

SEQ ID NO: 9275 - DNA, 25 bp, Homo sapiens
ttctactatgactatgagaccgttc

SEQ ID NO: 9276 - DNA, 25 bp, Homo sapiens
aaccgaatgcggtgctacaactgtg

SEQ ID NO: 9277 - DNA, 25 bp, Homo sapiens
acctgtctcttgccaggactgtgga

SEQ ID NO: 9278 - DNA, 25 bp, Homo sapiens
aggactgtggagcggatagggggag

SEQ ID NO: 9279 - DNA, 25 bp, Homo sapiens
agtgaccttgattcaccaacatcca

SEQ ID NO: 9280 - DNA, 25 bp, Homo sapiens
caacagcgccgtggcaagccatgtg

SEQ ID NO: 9281 - DNA, 25 bp, Homo sapiens
cagatcaagctacctggaaaccccc

SEQ ID NO: 9282 - DNA, 25 bp, Homo sapiens
cagggactgctacctgggagacctg

SEQ ID NO: 9283 - DNA, 25 bp, Homo sapiens
cttatccagcccacagggactgcta

SEQ ID NO: 9284 - DNA, 25 bp, Homo sapiens
gggaacaagggacatctgaacatct

SEQ ID NO: 9285 - DNA, 25 bp, Homo sapiens
ggtgggagacgtgacttatccagcc

SEQ ID NO: 9286 - DNA, 25 bp, Homo sapiens
gttcttgcaaagaggccgtgaccac

SEQ ID NO: 9287 - DNA, 25 bp, Homo sapiens
acatcatgctgatcaaactctcctc

SEQ ID NO: 9288 - DNA, 25 bp, Homo sapiens
ccctccagctgctggcactgagtgc

SEQ ID NO: 9289 - DNA, 25 bp, Homo sapiens
ctttggtgctgactacccagacgag

SEQ ID NO: 9290 - DNA, 25 bp, Homo sapiens
ggatgctccggtgctgagggaggct

SEQ ID NO: 9291 - DNA, 25 bp, Homo sapiens
gggacactctggacaatgacatcat

SEQ ID NO: 9292 - DNA, 25 bp, Homo sapiens
gggcaacactctgagctttggtgct

SEQ ID NO: 9293 - DNA, 25 bp, Homo sapiens
gtctgcaacggacagctccaaggag

SEQ ID NO: 9294 - DNA, 25 bp, Homo sapiens
gtgtgggcttccttgagggaggcaa

SEQ ID NO: 9295 - DNA, 25 bp, Homo sapiens
ttcctggaagcgtgactctggtggc

SEQ ID NO: 9296 - DNA, 25 bp, Homo sapiens
actcgcacaccaaccttatatttgg

SEQ ID NO: 9297 - DNA, 25 bp, Homo sapiens
attgggcccgatgatgcacaacaaa

SEQ ID NO: 9298 - DNA, 25 bp, Homo sapiens
cggaagagcaggtcttgatgtgtcc

SEQ ID NO: 9299 - DNA, 25 bp, Homo sapiens
ctcatcacacagcagtgcttggaga

SEQ ID NO: 9300 - DNA, 25 bp, Homo sapiens
gaagccactttgtcttaattgctgg

SEQ ID NO: 9301 - DNA, 25 bp, Homo sapiens
gaaggcattccatttctaaagctta

SEQ ID NO: 9302 - DNA, 25 bp, Homo sapiens
gagaaccagttatccaacatggtcc

SEQ ID NO: 9303 - DNA, 25 bp, Homo sapiens
gcttctaaagaattccacactaacg

SEQ ID NO: 9304 - DNA, 25 bp, Homo sapiens
ggacaagcttcatttacacgatatc

SEQ ID NO: 9305 - DNA, 25 bp, Homo sapiens
ggacttcaaattggacccaggagcc

SEQ ID NO: 9306 - DNA, 25 bp, Homo sapiens
ggagatgtgtatattgggcccgatg

SEQ ID NO: 9307 - DNA, 25 bp, Homo sapiens
aatgggctccatgttctgtagcccc

SEQ ID NO: 9308 - DNA, 25 bp, Homo sapiens
aggaagatggcctctgatggacaga

SEQ ID NO: 9309 - DNA, 25 bp, Homo sapiens
caaggattgtccctatgtcttggcc

SEQ ID NO: 9310 - DNA, 25 bp, Homo sapiens
cacgacacccatgagccgaaaggat

SEQ ID NO: 9311 - DNA, 25 bp, Homo sapiens
ctaaggatggctgattccccaaggg

SEQ ID NO: 9312 - DNA, 25 bp, Homo sapiens
gaaacctgcaccaaggattgtccct

SEQ ID NO: 9313 - DNA, 25 bp, Homo sapiens
gagccgaaaggatgtcactaaggat

SEQ ID NO: 9314 - DNA, 25 bp, Homo sapiens
gccttgcagaccaatgggctccatg

SEQ ID NO: 9315 - DNA, 25 bp, Homo sapiens
gctggaggaacacgtcatatcagat

SEQ ID NO: 9316 - DNA, 25 bp, Homo sapiens
tagcgaggggtagcagaaacctgca

SEQ ID NO: 9317 - DNA, 25 bp, Homo sapiens
tcttaactcagcttttgctactttg

SEQ ID NO: 9318 - DNA, 25 bp, Homo sapiens
actctctgctcttagaacctcaggt

SEQ ID NO: 9319 - DNA, 25 bp, Homo sapiens
agacaaccaggaccttgctatctcc

SEQ ID NO: 9320 - DNA, 25 bp, Homo sapiens
agcagtgcaagattcagttcaaggt

SEQ ID NO: 9321 - DNA, 25 bp, Homo sapiens
ctgtcgctgagcttcctagatagaa

SEQ ID NO: 9322 - DNA, 25 bp, Homo sapiens
gaaatggactctctgctcttagaac

SEQ ID NO: 9323 - DNA, 25 bp, Homo sapiens
gaacctcaggttctcaggcaagagc

SEQ ID NO: 9324 - DNA, 25 bp, Homo sapiens
gaggctacaacccagaagcagtctg

SEQ ID NO: 9325 - DNA, 25 bp, Homo sapiens
gagtcactccaggaaagagctgatg

SEQ ID NO: 9326 - DNA, 25 bp, Homo sapiens
ggggtgtgtgaaatcagtggccgcc

SEQ ID NO: 9327 - DNA, 25 bp, Homo sapiens
tattgccgaaccggccgttgtgcta

SEQ ID NO: 9328 - DNA, 25 bp, Homo sapiens
ttttactctgtgtaccttgtgtctt

SEQ ID NO: 9329 - DNA, 25 bp, Homo sapiens
aaatcagtggccagttgttcttctc

SEQ ID NO: 9330 - DNA, 25 bp, Homo sapiens
acatccctaaactggttgctgatta

SEQ ID NO: 9331 - DNA, 25 bp, Homo sapiens
cctgccagtgttcaactcaaaatca

SEQ ID NO: 9332 - DNA, 25 bp, Homo sapiens
ctgtgtggttgttggggtgttgcct

SEQ ID NO: 9333 - DNA, 25 bp, Homo sapiens
gaaatctggacgttctggcagctgc

SEQ ID NO: 9334 - DNA, 25 bp, Homo sapiens
gagaagttgaatctagatccactaa

SEQ ID NO: 9335 - DNA, 25 bp, Homo sapiens
gagctatggggtctgtgtggttgtt

SEQ ID NO: 9336 - DNA, 25 bp, Homo sapiens
gatccactaattactcatactctga

SEQ ID NO: 9337 - DNA, 25 bp, Homo sapiens
gatgctggtatagacttctgctttg

SEQ ID NO: 9338 - DNA, 25 bp, Homo sapiens
tgcctcaaccctcaggacttaaaga

SEQ ID NO: 9339 - DNA, 25 bp, Homo sapiens
tgttcttctcaggacgttctttgaa

SEQ ID NO: 9340 - DNA, 25 bp, Homo sapiens
agagagagctcctttgatttcaaag

SEQ ID NO: 9341 - DNA, 25 bp, Homo sapiens
ctaccctgtgtataacatttcgtac

SEQ ID NO: 9342 - DNA, 25 bp, Homo sapiens
ctatgtacaacctaccctgtgtata

SEQ ID NO: 9343 - DNA, 25 bp, Homo sapiens
cttgcgagcaagggagtgtatatac

SEQ ID NO: 9344 - DNA, 25 bp, Homo sapiens
ctttcactacaagtatttctaacag

SEQ ID NO: 9345 - DNA, 25 bp, Homo sapiens
ctttgatttcaaagggatgtcctca

SEQ ID NO: 9346 - DNA, 25 bp, Homo sapiens
gaaactgctatgtacaacctaccct

SEQ ID NO: 9347 - DNA, 25 bp, Homo sapiens
gattaggatttttcgcttgcgagca

SEQ ID NO: 9348 - DNA, 25 bp, Homo sapiens
gcatgttatacagaagcgattagga

SEQ ID NO: 9349 - DNA, 25 bp, Homo sapiens
taacagttgcaaggacacatacaca

SEQ ID NO: 9350 - DNA, 25 bp, Homo sapiens
tgtatatactaaatgccacactgta

SEQ ID NO: 9351 - DNA, 25 bp, Homo sapiens
agcgtgccatacagcactgggcagg

SEQ ID NO: 9352 - DNA, 25 bp, Homo sapiens
aggttgctcagcaaggcaccatgtg

SEQ ID NO: 9353 - DNA, 25 bp, Homo sapiens
caaccacgaaggctcgtggccttcc

SEQ ID NO: 9354 - DNA, 25 bp, Homo sapiens
ccaccacaaatgatgggcggcccca

SEQ ID NO: 9355 - DNA, 25 bp, Homo sapiens
ccccgcctatcatggcgtgaaccga

SEQ ID NO: 9356 - DNA, 25 bp, Homo sapiens
ccttcccctcagcaagatgtataca

SEQ ID NO: 9357 - DNA, 25 bp, Homo sapiens
gaaggggagatgtacagcgtgccat

SEQ ID NO: 9358 - DNA, 25 bp, Homo sapiens
gcacacagatcagagggccaaccac

SEQ ID NO: 9359 - DNA, 25 bp, Homo sapiens
gtggcaggggcgtaatgacatgacc

SEQ ID NO: 9360 - DNA, 25 bp, Homo sapiens
tatggcaatgcctatcctgccactg

SEQ ID NO: 9361 - DNA, 25 bp, Homo sapiens
tttccattccagtttggccgagacc

SEQ ID NO: 9362 - DNA, 25 bp, Homo sapiens
ccaagggtgctactcatccctatgg

SEQ ID NO: 9363 - DNA, 25 bp, Homo sapiens
cgagggactccagatacataccccg

SEQ ID NO: 9364 - DNA, 25 bp, Homo sapiens
ctgctactgctgaccaaattcccag

SEQ ID NO: 9365 - DNA, 25 bp, Homo sapiens
ctttggggttggttcctagaggcag

SEQ ID NO: 9366 - DNA, 25 bp, Homo sapiens
gacccaggttaactcaaagctttgc

SEQ ID NO: 9367 - DNA, 25 bp, Homo sapiens
gagggagctctggagtgctaacttg

SEQ ID NO: 9368 - DNA, 25 bp, Homo sapiens
ggaatcttgaatgctttctctcctc

SEQ ID NO: 9369 - DNA, 25 bp, Homo sapiens
ggcgctggaaaaaccttctcataca

SEQ ID NO: 9370 - DNA, 25 bp, Homo sapiens
gggcagattacagtcatttcctacc

SEQ ID NO: 9371 - DNA, 25 bp, Homo sapiens
gtggggcaatgactttcctagacaa

SEQ ID NO: 9372 - DNA, 25 bp, Homo sapiens
tctcatacacgcaggacccaggtta

SEQ ID NO: 9373 - DNA, 25 bp, Homo sapiens
aaagctctggccatgattccaaaca

SEQ ID NO: 9374 - DNA, 25 bp, Homo sapiens
aacacaaaagattccaccagactga

SEQ ID NO: 9375 - DNA, 25 bp, Homo sapiens
agtctgctgaagaggcattgcacag

SEQ ID NO: 9376 - DNA, 25 bp, Homo sapiens
atcatcaacatagtcctttggttct

SEQ ID NO: 9377 - DNA, 25 bp, Homo sapiens
atgtggacttgttctattgcctgac

SEQ ID NO: 9378 - DNA, 25 bp, Homo sapiens
gagtatataatattcctgtgcgatt

SEQ ID NO: 9379 - DNA, 25 bp, Homo sapiens
gtgaggttgagttatcatgctacta

SEQ ID NO: 9380 - DNA, 25 bp, Homo sapiens
tattgcctgacctgatgaactgtta

SEQ ID NO: 9381 - DNA, 25 bp, Homo sapiens
tcctttggttcttattgacagtcag

SEQ ID NO: 9382 - DNA, 25 bp, Homo sapiens
tgaagtggtcatccatttcttttta

SEQ ID NO: 9383 - DNA, 25 bp, Homo sapiens
ttgcttcagacactttcccaaagtt

SEQ ID NO: 9384 - DNA, 25 bp, Homo sapiens
aataataggtcgatcttcctcgcca

SEQ ID NO: 9385 - DNA, 25 bp, Homo sapiens
ctcgccaactcatatttcacacaga

SEQ ID NO: 9386 - DNA, 25 bp, Homo sapiens
tcgacctattattggtctaggccaa

SEQ ID NO: 9387 - DNA, 25 bp, Homo sapiens
agagcgatgtcctcgaggcgatgat

SEQ ID NO: 9388 - DNA, 25 bp, Homo sapiens
atatatcccggatgaggctgacttt

SEQ ID NO: 9389 - DNA, 25 bp, Homo sapiens
atattctcaccatcctgactgaagt

SEQ ID NO: 9390 - DNA, 25 bp, Homo sapiens
atggatttatcatcacctcaaacga

SEQ ID NO: 9391 - DNA, 25 bp, Homo sapiens
cagtcactttgccagagcctgagag

SEQ ID NO: 9392 - DNA, 25 bp, Homo sapiens
catggggaaacagatgcctcagcct

SEQ ID NO: 9393 - DNA, 25 bp, Homo sapiens
gagctgacatctcagttcactggtt

SEQ ID NO: 9394 - DNA, 25 bp, Homo sapiens
ggaacctggtacatccagtcacttt

SEQ ID NO: 9395 - DNA, 25 bp, Homo sapiens
gtgaataactgtgtttcctaccgaa

SEQ ID NO: 9396 - DNA, 25 bp, Homo sapiens
tgtcttcccttctgattgatggtgc

SEQ ID NO: 9397 - DNA, 25 bp, Homo sapiens
ttcctaccgaaaccctgcagaggga

SEQ ID NO: 9398 - DNA, 25 bp, Homo sapiens
aaatccaaccagttaccctgcaagt

SEQ ID NO: 9399 - DNA, 25 bp, Homo sapiens
agccttgggggtagtgctagccata

SEQ ID NO: 9400 - DNA, 25 bp, Homo sapiens
atctcctcctttacaagagctttcc

SEQ ID NO: 9401 - DNA, 25 bp, Homo sapiens
cctcgactgcgaaccagaggctcag

SEQ ID NO: 9402 - DNA, 25 bp, Homo sapiens
ctcactgtactgatttactggcgca

SEQ ID NO: 9403 - DNA, 25 bp, Homo sapiens
ctccttcatcaacctctcagagaat

SEQ ID NO: 9404 - DNA, 25 bp, Homo sapiens
gaacattgtccgaagtagcctaatc

SEQ ID NO: 9405 - DNA, 25 bp, Homo sapiens
gagctctgccagggtgagatgtttc

SEQ ID NO: 9406 - DNA, 25 bp, Homo sapiens
gagtggaagaagtggcctcgactgc

SEQ ID NO: 9407 - DNA, 25 bp, Homo sapiens
tatctggtcagagcctagtgatccc

SEQ ID NO: 9408 - DNA, 25 bp, Homo sapiens
ttccttggtctctaatcacctgagc

SEQ ID NO: 9409 - DNA, 25 bp, Homo sapiens
aagaactgtatttagtgattatttt

SEQ ID NO: 9410 - DNA, 25 bp, Homo sapiens
agcattcatctgtgtgtaaattatt

SEQ ID NO: 9411 - DNA, 25 bp, Homo sapiens
atattatagcattcatctgtgtgta

SEQ ID NO: 9412 - DNA, 25 bp, Homo sapiens
gaagcagatcatttcccaaaattct

SEQ ID NO: 9413 - DNA, 25 bp, Homo sapiens
gatgtgcatttctgtgatgttatga

SEQ ID NO: 9414 - DNA, 25 bp, Homo sapiens
gatgttatgaatacatttctacttt

SEQ ID NO: 9415 - DNA, 25 bp, Homo sapiens
gcagatcatttcccaaaattctaag

SEQ ID NO: 9416 - DNA, 25 bp, Homo sapiens
gtaccctgctgtataataaacaatc

SEQ ID NO: 9417 - DNA, 25 bp, Homo sapiens
gttaaagaactgcttagtattagaa

SEQ ID NO: 9418 - DNA, 25 bp, Homo sapiens
tgaaaaaaatctttgcttgtttatt

SEQ ID NO: 9419 - DNA, 25 bp, Homo sapiens
ttagactaacttccatggtgccctg

SEQ ID NO: 9420 - DNA, 25 bp, Homo sapiens
aactcaacgtcaggatcctgcagct

SEQ ID NO: 9421 - DNA, 25 bp, Homo sapiens
aagtggaaccagcaacacctgaaga

SEQ ID NO: 9422 - DNA, 25 bp, Homo sapiens
agaaggggaaccagcaactcaacgt

SEQ ID NO: 9423 - DNA, 25 bp, Homo sapiens
agcaactcaacgtcaggatcctgca

SEQ ID NO: 9424 - DNA, 25 bp, Homo sapiens
cccacagactgggtgtgagtgtgaa

SEQ ID NO: 9425 - DNA, 25 bp, Homo sapiens
cggcccgagcagttcagtgatgaag

SEQ ID NO: 9426 - DNA, 25 bp, Homo sapiens
gaggaggtgaaaacgcctgaagaag

SEQ ID NO: 9427 - DNA, 25 bp, Homo sapiens
gtgatgaagtggaaccagcaacacc

SEQ ID NO: 9428 - DNA, 25 bp, Homo sapiens
gtgtgaagatggtcctgatgggcag

SEQ ID NO: 9429 - DNA, 25 bp, Homo sapiens
aagccgtgagtcaggcctgggtgtg

SEQ ID NO: 9430 - DNA, 25 bp, Homo sapiens
cagccagagggactcctgcaagggc

SEQ ID NO: 9431 - DNA, 25 bp, Homo sapiens
ccgtgacgacatgctgtgtgccggg

SEQ ID NO: 9432 - DNA, 25 bp, Homo sapiens
gtgaatggcacctggctacaggcgg

SEQ ID NO: 9433 - DNA, 25 bp, Homo sapiens
tacacgggagacgacgtccgcatca

SEQ ID NO: 9434 - DNA, 25 bp, Homo sapiens
tcagctgggacgagggctgtgccca

SEQ ID NO: 9435 - DNA, 25 bp, Homo sapiens
tgcaagggcgactctggagggcccc

SEQ ID NO: 9436 - DNA, 25 bp, Homo sapiens
tgccacctgggtcactggaggacca

SEQ ID NO: 9437 - DNA, 25 bp, Homo sapiens
agcagtatcctcgctggtgaagacc

SEQ ID NO: 9438 - DNA, 25 bp, Homo sapiens
atcgctctacacctgagtcacgagc

SEQ ID NO: 9439 - DNA, 25 bp, Homo sapiens
cctgagtcacgagctgctgtccagg

SEQ ID NO: 9440 - DNA, 25 bp, Homo sapiens
gagggacagtcatctagggcctcat

SEQ ID NO: 9441 - DNA, 25 bp, Homo sapiens
gccacagattatcttgtacagcctt

SEQ ID NO: 9442 - DNA, 25 bp, Homo sapiens
ggaacacaaccatagcctgtttcgt

SEQ ID NO: 9443 - DNA, 25 bp, Homo sapiens
ggagtcacaagacactgttgcagag

SEQ ID NO: 9444 - DNA, 25 bp, Homo sapiens
gtccaggaactttccagcagtatcc

SEQ ID NO: 9445 - DNA, 25 bp, Homo sapiens
gtgttctggttggtaaagcctcagc

SEQ ID NO: 9446 - DNA, 25 bp, Homo sapiens
tagcctgtttcgtagccatattaat

SEQ ID NO: 9447 - DNA, 25 bp, Homo sapiens
tgccttacattattactccttgcca

SEQ ID NO: 9448 - DNA, 25 bp, Homo sapiens
aaagcttatgaggctgatgcccagg

SEQ ID NO: 9449 - DNA, 25 bp, Homo sapiens
aggaaactgtcgtgtgtcccataca

SEQ ID NO: 9450 - DNA, 25 bp, Homo sapiens
atattcctatgggacctgcactgtc

SEQ ID NO: 9451 - DNA, 25 bp, Homo sapiens
attgccatcaactttgtttcctcat

SEQ ID NO: 9452 - DNA, 25 bp, Homo sapiens
gagccactccaagctgaggatgatc

SEQ ID NO: 9453 - DNA, 25 bp, Homo sapiens
gagctttgggctcaacaagggcttt

SEQ ID NO: 9454 - DNA, 25 bp, Homo sapiens
gcagcgtggggcaaatgaccaggac

SEQ ID NO: 9455 - DNA, 25 bp, Homo sapiens
gtattaaccacagattctgctgcct

SEQ ID NO: 9456 - DNA, 25 bp, Homo sapiens
gtcccatacattgccatcaactttg

SEQ ID NO: 9457 - DNA, 25 bp, Homo sapiens
tgccgtctcctttgcagaggatgca

SEQ ID NO: 9458 - DNA, 25 bp, Homo sapiens
tgggacctgcactgtcatgggtatt

SEQ ID NO: 9459 - DNA, 25 bp, Homo sapiens
aacagccgggttgtatcacaggatg

SEQ ID NO: 9460 - DNA, 25 bp, Homo sapiens
aactcaatgtccagtggctcagagc

SEQ ID NO: 9461 - DNA, 25 bp, Homo sapiens
acaacctcaaatcctcctgttggat

SEQ ID NO: 9462 - DNA, 25 bp, Homo sapiens
acagaggattgctattgcccgagcc

SEQ ID NO: 9463 - DNA, 25 bp, Homo sapiens
aggagcctatcctatttgactgcag

SEQ ID NO: 9464 - DNA, 25 bp, Homo sapiens
ccaaagctgccaacatacatccttt

SEQ ID NO: 9465 - DNA, 25 bp, Homo sapiens
gaagctacatcagctctggatactg

SEQ ID NO: 9466 - DNA, 25 bp, Homo sapiens
gataaggggactcagctctcaggag

SEQ ID NO: 9467 - DNA, 25 bp, Homo sapiens
ggaatcgtgtctcaggagcctatcc

SEQ ID NO: 9468 - DNA, 25 bp, Homo sapiens
ggctcagagctcaactcggaatcgt

SEQ ID NO: 9469 - DNA, 25 bp, Homo sapiens
ttcatcgagacgttaccccacaaat

SEQ ID NO: 9470 - DNA, 25 bp, Homo sapiens
aacagggtgtggcagaagcagcagg

SEQ ID NO: 9471 - DNA, 25 bp, Homo sapiens
aggagggagtggtgcatggtgtggc

SEQ ID NO: 9472 - DNA, 25 bp, Homo sapiens
gacagcagtagcccagaagacagtg

SEQ ID NO: 9473 - DNA, 25 bp, Homo sapiens
gagggtgttctctatgtaggctcca

SEQ ID NO: 9474 - DNA, 25 bp, Homo sapiens
gcatggtgtggcaacagtggctgag

SEQ ID NO: 9475 - DNA, 25 bp, Homo sapiens
ggaattcattagccatggatgtatt

SEQ ID NO: 9476 - DNA, 25 bp, Homo sapiens
gggagcagggagcattgcagcagcc

SEQ ID NO: 9477 - DNA, 25 bp, Homo sapiens
gggagttgtggctgctgctgagaaa

SEQ ID NO: 9478 - DNA, 25 bp, Homo sapiens
ggtgacgggtgtgacagcagtagcc

SEQ ID NO: 9479 - DNA, 25 bp, Homo sapiens
gttggaggagcagtggtgacgggtg

SEQ ID NO: 9480 - DNA, 25 bp, Homo sapiens
tgcagcagccactggctttgtcaaa

SEQ ID NO: 9481 - DNA, 25 bp, Homo sapiens
aacggaagcagcctctcgatataac

SEQ ID NO: 9482 - DNA, 25 bp, Homo sapiens
agaaggtaccatcaatgtccacgac

SEQ ID NO: 9483 - DNA, 25 bp, Homo sapiens
ctctcgatataacctgacgatctca

SEQ ID NO: 9484 - DNA, 25 bp, Homo sapiens
gacgatctcagacgtcagcgtgagt

SEQ ID NO: 9485 - DNA, 25 bp, Homo sapiens
gacgtcagcgtgagtgatgtgccat

SEQ ID NO: 9486 - DNA, 25 bp, Homo sapiens
gactctggccttccgagaaggtacc

SEQ ID NO: 9487 - DNA, 25 bp, Homo sapiens
gcagcctctcgatataacctgacga

SEQ ID NO: 9488 - DNA, 25 bp, Homo sapiens
ggccaggatctgtggtggtacaatt

SEQ ID NO: 9489 - DNA, 25 bp, Homo sapiens
gtataaaacggaagcagcctctcga

SEQ ID NO: 9490 - DNA, 25 bp, Homo sapiens
gtggtggtacaattgactctggcct

SEQ ID NO: 9491 - DNA, 25 bp, Homo sapiens
tatctcattgccttggctgtctgtc

SEQ ID NO: 9492 - DNA, 25 bp, Homo sapiens
aatgtgtcagccaccttgataaatg

SEQ ID NO: 9493 - DNA, 25 bp, Homo sapiens
agaacagcagctttctagggacagc

SEQ ID NO: 9494 - DNA, 25 bp, Homo sapiens
agggacagctggaaagggacttaat

SEQ ID NO: 9495 - DNA, 25 bp, Homo sapiens
agtggatcactgttagggtaaggga

SEQ ID NO: 9496 - DNA, 25 bp, Homo sapiens
gactatttcttacgagggttctact

SEQ ID NO: 9497 - DNA, 25 bp, Homo sapiens
gggacttaatgtgtttgactatttc

SEQ ID NO: 9498 - DNA, 25 bp, Homo sapiens
gtcttgcttgtagggcataatgcct

SEQ ID NO: 9499 - DNA, 25 bp, Homo sapiens
gtgggagaccataatgtgtcagcca

SEQ ID NO: 9500 - DNA, 25 bp, Homo sapiens
gtttaatgtccattctgcagcgttt

SEQ ID NO: 9501 - DNA, 25 bp, Homo sapiens
gtttcatcaaacatagctcagtcct

SEQ ID NO: 9502 - DNA, 25 bp, Homo sapiens
tatgctgaagtttcccttagacatt

SEQ ID NO: 9503 - DNA, 25 bp, Homo sapiens
aaagtggaaagctccgtggcttcct

SEQ ID NO: 9504 - DNA, 25 bp, Homo sapiens
agactataactgtcatctagcccct

SEQ ID NO: 9505 - DNA, 25 bp, Homo sapiens
ccaggtccacttatgccgaggagtc

SEQ ID NO: 9506 - DNA, 25 bp, Homo sapiens
cttcctccgtgttggagacctggtg

SEQ ID NO: 9507 - DNA, 25 bp, Homo sapiens
gatgtagatcgccgggtgcaatttg

SEQ ID NO: 9508 - DNA, 25 bp, Homo sapiens
gattgtggtgacaggctggcgacct

SEQ ID NO: 9509 - DNA, 25 bp, Homo sapiens
gctgccatcattgtgctgaccacaa

SEQ ID NO: 9510 - DNA, 25 bp, Homo sapiens
gctttaccgtgaacctccagaagcc

SEQ ID NO: 9511 - DNA, 25 bp, Homo sapiens
gtgctaagcatatcctgagacgccc

SEQ ID NO: 9512 - DNA, 25 bp, Homo sapiens
tccggctacaccaacatcatgaggg

SEQ ID NO: 9513 - DNA, 25 bp, Homo sapiens
tgtgtccaattatgcactggccacc

SEQ ID NO: 9514 - DNA, 25 bp, Homo sapiens
caaagtgcagcaaccattcaacctc

SEQ ID NO: 9515 - DNA, 25 bp, Homo sapiens
cccagccacaccaaaggcgagcagg

SEQ ID NO: 9516 - DNA, 25 bp, Homo sapiens
cgagtgcccatttgagcggcagcac

SEQ ID NO: 9517 - DNA, 25 bp, Homo sapiens
ctctggcaatgcctatggccacacc

SEQ ID NO: 9518 - DNA, 25 bp, Homo sapiens
gaatcatccggaccaaagtgcagca

SEQ ID NO: 9519 - DNA, 25 bp, Homo sapiens
gacactgtgcccagtgtcagctcca

SEQ ID NO: 9520 - DNA, 25 bp, Homo sapiens
gactcacagagcagcagcagcggac

SEQ ID NO: 9521 - DNA, 25 bp, Homo sapiens
gagttccccatattattacagttcc

SEQ ID NO: 9522 - DNA, 25 bp, Homo sapiens
gctcagcctggcagcgacaagagga

SEQ ID NO: 9523 - DNA, 25 bp, Homo sapiens
gctgccgactaagcattgactcaca

SEQ ID NO: 9524 - DNA, 25 bp, Homo sapiens
gttccacatcaaggccgagtgcacc

SEQ ID NO: 9525 - DNA, 25 bp, Homo sapiens
acttctgatgtccgtaggccttaaa

SEQ ID NO: 9526 - DNA, 25 bp, Homo sapiens
agctgagcgagctccgcagtgagat

SEQ ID NO: 9527 - DNA, 25 bp, Homo sapiens
cctctgttaccacgacttctagtgc

SEQ ID NO: 9528 - DNA, 25 bp, Homo sapiens
gagaacacggtggcagagacggagt

SEQ ID NO: 9529 - DNA, 25 bp, Homo sapiens
gctccgcagtgagatggagtgccag

SEQ ID NO: 9530 - DNA, 25 bp, Homo sapiens
ggacatcaagacacgtctggagcag

SEQ ID NO: 9531 - DNA, 25 bp, Homo sapiens
ggagtgccagaaccaagagtacaag

SEQ ID NO: 9532 - DNA, 25 bp, Homo sapiens
ggatacgctttggtttctcaacttc

SEQ ID NO: 9533 - DNA, 25 bp, Homo sapiens
ggcagagacggagtgccgctatgcc

SEQ ID NO: 9534 - DNA, 25 bp, Homo sapiens
gtaggccttaaatctgcctggcgtc

SEQ ID NO: 9535 - DNA, 25 bp, Homo sapiens
tctgttaccacgacttctagtgcct

SEQ ID NO: 9536 - DNA, 25 bp, Homo sapiens
aaaactactgtgtctgataccaaaa

SEQ ID NO: 9537 - DNA, 25 bp, Homo sapiens
caaactccatcgttgagcctggggt

SEQ ID NO: 9538 - DNA, 25 bp, Homo sapiens
gaagctgatgttcctggtaaaagtt

SEQ ID NO: 9539 - DNA, 25 bp, Homo sapiens
gacttcaagccaagcgtatgtatca

SEQ ID NO: 9540 - DNA, 25 bp, Homo sapiens
gagcctggggtgtaagacttcaagc

SEQ ID NO: 9541 - DNA, 25 bp, Homo sapiens
gaggtacaattttccaaacttccag

SEQ ID NO: 9542 - DNA, 25 bp, Homo sapiens
gtgtagcttgctagtttgttttcta

SEQ ID NO: 9543 - DNA, 25 bp, Homo sapiens
gtgtaggtgaatgcaaactccatcg

SEQ ID NO: 9544 - DNA, 25 bp, Homo sapiens
tagtcttccaggattcacggtgcac

SEQ ID NO: 9545 - DNA, 25 bp, Homo sapiens
ttcacggtgcacatgctggcattca

SEQ ID NO: 9546 - DNA, 25 bp, Homo sapiens
ttgctggcttctcttatactaaccc

SEQ ID NO: 9547 - DNA, 25 bp, Homo sapiens
aaaacaccaaagtctcctgttcgct

SEQ ID NO: 9548 - DNA, 25 bp, Homo sapiens
aaccattgtgtgtttcctctttgaa

SEQ ID NO: 9549 - DNA, 25 bp, Homo sapiens
aagtctcctgttcgctcataaagaa

SEQ ID NO: 9550 - DNA, 25 bp, Homo sapiens
agactgggcgaaaggctgtccggag

SEQ ID NO: 9551 - DNA, 25 bp, Homo sapiens
agcaatgacaagcactttactttca

SEQ ID NO: 9552 - DNA, 25 bp, Homo sapiens
aggtgccttgccgcagagaaaacac

SEQ ID NO: 9553 - DNA, 25 bp, Homo sapiens
attgctgtggaacctcttttggagg

SEQ ID NO: 9554 - DNA, 25 bp, Homo sapiens
gacggcaatgcaatagcctatttaa

SEQ ID NO: 9555 - DNA, 25 bp, Homo sapiens
gatcaaaggcctcagaaaccattgt

SEQ ID NO: 9556 - DNA, 25 bp, Homo sapiens
gtagatttcttgacagtgctgtaat

SEQ ID NO: 9557 - DNA, 25 bp, Homo sapiens
gtgtttcctctttgaagcaatgaca

SEQ ID NO: 9558 - DNA, 25 bp, Homo sapiens
aagagagtttcttgggtcacttcct

SEQ ID NO: 9559 - DNA, 25 bp, Homo sapiens
agggatattttctctgacttgtcaa

SEQ ID NO: 9560 - DNA, 25 bp, Homo sapiens
atccaatgaacatccaacctccatt

SEQ ID NO: 9561 - DNA, 25 bp, Homo sapiens
ccaatgcatttggtcgtgtgccacc

SEQ ID NO: 9562 - DNA, 25 bp, Homo sapiens
gaccaccacatatgctaatacctat

SEQ ID NO: 9563 - DNA, 25 bp, Homo sapiens
gcaattctcccttatcagggccatt

SEQ ID NO: 9564 - DNA, 25 bp, Homo sapiens
gcagatagtttggctgctcctgtgc

SEQ ID NO: 9565 - DNA, 25 bp, Homo sapiens
gtatcacttgtattgaccaccacat

SEQ ID NO: 9566 - DNA, 25 bp, Homo sapiens
tacctatctactgctgagttgtcag

SEQ ID NO: 9567 - DNA, 25 bp, Homo sapiens
tcccattccctcaagatccaatgaa

SEQ ID NO: 9568 - DNA, 25 bp, Homo sapiens
tctctgacttgtcaatccacatctt

SEQ ID NO: 9569 - DNA, 25 bp, Homo sapiens
aacacagtgtttcctgagtagcagt

SEQ ID NO: 9570 - DNA, 25 bp, Homo sapiens
acagggagctggcaatgccctacct

SEQ ID NO: 9571 - DNA, 25 bp, Homo sapiens
ataacatgtatcactcactgccaaa

SEQ ID NO: 9572 - DNA, 25 bp, Homo sapiens
ccccactcacagggagctggcaatg

SEQ ID NO: 9573 - DNA, 25 bp, Homo sapiens
ccccccaattgctgccaatagtgga

SEQ ID NO: 9574 - DNA, 25 bp, Homo sapiens
gaaacaggctctgagatttcacagg

SEQ ID NO: 9575 - DNA, 25 bp, Homo sapiens
gatttcacaggtcttgcccaaagtc

SEQ ID NO: 9576 - DNA, 25 bp, Homo sapiens
gcaggagtaagtttctcatcccatg

SEQ ID NO: 9577 - DNA, 25 bp, Homo sapiens
gtgattgttatgccttgctatttta

SEQ ID NO: 9578 - DNA, 25 bp, Homo sapiens
tacctgcctgttctccagatggaga

SEQ ID NO: 9579 - DNA, 25 bp, Homo sapiens
tgccttaaggccacactggcatctc

SEQ ID NO: 9580 - DNA, 25 bp, Homo sapiens
atcccataagcatccaaactccatt

SEQ ID NO: 9581 - DNA, 25 bp, Homo sapiens
ctgcaactctttttttatcaaggac

SEQ ID NO: 9582 - DNA, 25 bp, Homo sapiens
gaacctcaatactactgcagttacc

SEQ ID NO: 9583 - DNA, 25 bp, Homo sapiens
gaagaatgctagcccatctggctgc

SEQ ID NO: 9584 - DNA, 25 bp, Homo sapiens
gctaatacttttctaatgctgactt

SEQ ID NO: 9585 - DNA, 25 bp, Homo sapiens
gtaacacttgtattaattgctgcat

SEQ ID NO: 9586 - DNA, 25 bp, Homo sapiens
gtgcaggagaaggacttgcccgcat

SEQ ID NO: 9587 - DNA, 25 bp, Homo sapiens
taaggagagttgttcaggtcactgc

SEQ ID NO: 9588 - DNA, 25 bp, Homo sapiens
taccaaagggattgtttctctgcca

SEQ ID NO: 9589 - DNA, 25 bp, Homo sapiens
tatatctgcaattattcatactctg

SEQ ID NO: 9590 - DNA, 25 bp, Homo sapiens
ttcccactattatgtcttctctgac

SEQ ID NO: 9591 - DNA, 25 bp, Homo sapiens
agggccggttggaagcagggagctg

SEQ ID NO: 9592 - DNA, 25 bp, Homo sapiens
catgtctacacatgtgggtgcccat

SEQ ID NO: 9593 - DNA, 25 bp, Homo sapiens
ctgctgcttcatgcgagagggagat

SEQ ID NO: 9594 - DNA, 25 bp, Homo sapiens
gcccatcaagtattacctgcagcga

SEQ ID NO: 9595 - DNA, 25 bp, Homo sapiens
gcgactcaaccctatgcatggaggg

SEQ ID NO: 9596 - DNA, 25 bp, Homo sapiens
ggaagagcagtggagccttgcccac

SEQ ID NO: 9597 - DNA, 25 bp, Homo sapiens
ggagctggaccgcagtgtccaggct

SEQ ID NO: 9598 - DNA, 25 bp, Homo sapiens
ggatttttcttccctagacacaagg

SEQ ID NO: 9599 - DNA, 25 bp, Homo sapiens
gggtgcccatggatagtacgtgtgt

SEQ ID NO: 9600 - DNA, 25 bp, Homo sapiens
gtctgaactcctatttagggccggt

SEQ ID NO: 9601 - DNA, 25 bp, Homo sapiens
ttaggcactttttgaccttgctgtc

SEQ ID NO: 9602 - DNA, 25 bp, Homo sapiens
aactcctgcaaatgctgcacctgga

SEQ ID NO: 9603 - DNA, 25 bp, Homo sapiens
agctgatgggctctatcccaatcct

SEQ ID NO: 9604 - DNA, 25 bp, Homo sapiens
agtccagctttgaggctgggcccag

SEQ ID NO: 9605 - DNA, 25 bp, Homo sapiens
caagacacgttctgccagggcaaag

SEQ ID NO: 9606 - DNA, 25 bp, Homo sapiens
cagccctggacaagacacgttctgc

SEQ ID NO: 9607 - DNA, 25 bp, Homo sapiens
gaagttccaaaaccaggtcagccct

SEQ ID NO: 9608 - DNA, 25 bp, Homo sapiens
ggaattgagtcgtaaagcccctcca

SEQ ID NO: 9609 - DNA, 25 bp, Homo sapiens
gtccagcttctacagctgtgcagcg

SEQ ID NO: 9610 - DNA, 25 bp, Homo sapiens
tatcccaatcctcgggaacggtcca

SEQ ID NO: 9611 - DNA, 25 bp, Homo sapiens
ttcaggcaccccagagcttgaagtt

SEQ ID NO: 9612 - DNA, 25 bp, Homo sapiens
ttctgccagggcaaagctgatgggc

SEQ ID NO: 9613 - DNA, 25 bp, Homo sapiens
aatcccataatgtcagcttgatcga

SEQ ID NO: 9614 - DNA, 25 bp, Homo sapiens
acacgactccatcacagggagcctg

SEQ ID NO: 9615 - DNA, 25 bp, Homo sapiens
actggctgggtcatgagggaacgga

SEQ ID NO: 9616 - DNA, 25 bp, Homo sapiens
agagcagatccaagtcttgcagcaa

SEQ ID NO: 9617 - DNA, 25 bp, Homo sapiens
gaactcctgcatcaagtcctagagg

SEQ ID NO: 9618 - DNA, 25 bp, Homo sapiens
gaatccaaggaccacaaatcccata

SEQ ID NO: 9619 - DNA, 25 bp, Homo sapiens
gctatcacggatttactggctgggt

SEQ ID NO: 9620 - DNA, 25 bp, Homo sapiens
ggagaagaatttcctgctatcacgg

SEQ ID NO: 9621 - DNA, 25 bp, Homo sapiens
ggatcctcacagaatttgaactcct

SEQ ID NO: 9622 - DNA, 25 bp, Homo sapiens
tacacagggtcgatgtcttcacgga

SEQ ID NO: 9623 - DNA, 25 bp, Homo sapiens
tcctctgttttgtgtgtcgtgaatc

SEQ ID NO: 9624 - DNA, 25 bp, Homo sapiens
aaacctgggcacctaagcaatgagc

SEQ ID NO: 9625 - DNA, 25 bp, Homo sapiens
gagcagtgccaactcttggaggtcc

SEQ ID NO: 9626 - DNA, 25 bp, Homo sapiens
gtattcctatgccagagcagtgcca

SEQ ID NO: 9627 - DNA, 25 bp, Homo sapiens
gtgcagccaatgcctttgtgtggta

SEQ ID NO: 9628 - DNA, 25 bp, Homo sapiens
taccctcctgtaagcaacactttaa

SEQ ID NO: 9629 - DNA, 25 bp, Homo sapiens
tgatatgtgcaccaatacctactga

SEQ ID NO: 9630 - DNA, 25 bp, Homo sapiens
tggtgatgtttgcatttaccctcct

SEQ ID NO: 9631 - DNA, 25 bp, Homo sapiens
tgtaacggccaacactttgttcgct

SEQ ID NO: 9632 - DNA, 25 bp, Homo sapiens
ttggaggtcccagagtgcagccaat

SEQ ID NO: 9633 - DNA, 25 bp, Homo sapiens
tttaacgtcttacattttctctgat

SEQ ID NO: 9634 - DNA, 25 bp, Homo sapiens
tttgttcgctcattttacgctgtct

SEQ ID NO: 9635 - DNA, 25 bp, Homo sapiens
aaccccagacacctacatgttctga

SEQ ID NO: 9636 - DNA, 25 bp, Homo sapiens
agatccaaagttgtcttctgtccac

SEQ ID NO: 9637 - DNA, 25 bp, Homo sapiens
agtggtcaaaatccctttcaccatc

SEQ ID NO: 9638 - DNA, 25 bp, Homo sapiens
cggaacattccaggccaactttcct

SEQ ID NO: 9639 - DNA, 25 bp, Homo sapiens
ctgccacccatggagggacctacag

SEQ ID NO: 9640 - DNA, 25 bp, Homo sapiens
ggggaggcccatgaacgtaggctcc

SEQ ID NO: 9641 - DNA, 25 bp, Homo sapiens
gtgacccactgcttgtttctgtcac

SEQ ID NO: 9642 - DNA, 25 bp, Homo sapiens
tagaacttccaaatgctgagcccag

SEQ ID NO: 9643 - DNA, 25 bp, Homo sapiens
tcatcgctggtgctccgacaaaaaa

SEQ ID NO: 9644 - DNA, 25 bp, Homo sapiens
ttcaaatagttggccttcacccact

SEQ ID NO: 9645 - DNA, 25 bp, Homo sapiens
tttccgtgactctccatacgagtgg

SEQ ID NO: 9646 - DNA, 25 bp, Homo sapiens
aaagtagggactgtgaccctcctgg

SEQ ID NO: 9647 - DNA, 25 bp, Homo sapiens
cagtgtctagaggaccacacctggg

SEQ ID NO: 9648 - DNA, 25 bp, Homo sapiens
gcagcaatcggagccagtgtctaga

SEQ ID NO: 9649 - DNA, 25 bp, Homo sapiens
ggagtggagcagtgcacttccagtc

SEQ ID NO: 9650 - DNA, 25 bp, Homo sapiens
ggcacttcttgcctttcaggagagt

SEQ ID NO: 9651 - DNA, 25 bp, Homo sapiens
ggcgtgcaggagcagcaatgcgttg

SEQ ID NO: 9652 - DNA, 25 bp, Homo sapiens
gggaatccagttcatggctattttg

SEQ ID NO: 9653 - DNA, 25 bp, Homo sapiens
ggtactacttagtgggcgtgcagga

SEQ ID NO: 9654 - DNA, 25 bp, Homo sapiens
taacttcaccttaggatccaccatt

SEQ ID NO: 9655 - DNA, 25 bp, Homo sapiens
tatgtgcaatgaccactacatcctc

SEQ ID NO: 9656 - DNA, 25 bp, Homo sapiens
tgtcctgatcctgtgctggtgaatg

SEQ ID NO: 9657 - DNA, 25 bp, Homo sapiens
catagccaggaacagggtcacccac

SEQ ID NO: 9658 - DNA, 25 bp, Homo sapiens
ggccgaagcctgaagctcatagcca

SEQ ID NO: 9659 - DNA, 25 bp, Homo sapiens
tgatgcaggctgctcctattttgga

SEQ ID NO: 9660 - DNA, 25 bp, Homo sapiens
aagaggagcctcggtaggtggtcgc

SEQ ID NO: 9661 - DNA, 25 bp, Homo sapiens
cctccgtgtacctgcgttgtaaaat

SEQ ID NO: 9662 - DNA, 25 bp, Homo sapiens
cgaagagggatgtgggctcctacca

SEQ ID NO: 9663 - DNA, 25 bp, Homo sapiens
ctcccccaaggctcatggtccttgg

SEQ ID NO: 9664 - DNA, 25 bp, Homo sapiens
gactcggggacttgggatgttcctc

SEQ ID NO: 9665 - DNA, 25 bp, Homo sapiens
gatgttcctcttggtgtcatattcc

SEQ ID NO: 9666 - DNA, 25 bp, Homo sapiens
gattgagccctacattgtgctgcac

SEQ ID NO: 9667 - DNA, 25 bp, Homo sapiens
gctaccgaggctgtgtgttgaggtc

SEQ ID NO: 9668 - DNA, 25 bp, Homo sapiens
gtcaatacttacttcttagcactgt

SEQ ID NO: 9669 - DNA, 25 bp, Homo sapiens
tgacctggatggcccatagacctga

SEQ ID NO: 9670 - DNA, 25 bp, Homo sapiens
tgctgcacctggtcatacggagttg

SEQ ID NO: 9671 - DNA, 25 bp, Homo sapiens
aggagagagtggtctggtgggcttc

SEQ ID NO: 9672 - DNA, 25 bp, Homo sapiens
agtcttctataatctggggtcggag

SEQ ID NO: 9673 - DNA, 25 bp, Homo sapiens
attccctaggtctttccaggatgca

SEQ ID NO: 9674 - DNA, 25 bp, Homo sapiens
cctcatctacgagaacgtggccgcc

SEQ ID NO: 9675 - DNA, 25 bp, Homo sapiens
gatagcttggattccctaggtcttt

SEQ ID NO: 9676 - DNA, 25 bp, Homo sapiens
ggaagtcccgtatgaggatgtcgaa

SEQ ID NO: 9677 - DNA, 25 bp, Homo sapiens
ggaatttgggtctggagttctggct

SEQ ID NO: 9678 - DNA, 25 bp, Homo sapiens
ggagttctggctacttgaggaccaa

SEQ ID NO: 9679 - DNA, 25 bp, Homo sapiens
ggtgggcttcagatgagtcctatgg

SEQ ID NO: 9680 - DNA, 25 bp, Homo sapiens
taagtgacgagggggctgggtcggc

SEQ ID NO: 9681 - DNA, 25 bp, Homo sapiens
tggggatctggattcctggttccct

SEQ ID NO: 9682 - DNA, 25 bp, Homo sapiens
aacacgtcagtgggcagatgctgta

SEQ ID NO: 9683 - DNA, 25 bp, Homo sapiens
acaacttcatctgtactgcttgaat

SEQ ID NO: 9684 - DNA, 25 bp, Homo sapiens
aggagttgtgtcgagctcacagcgt

SEQ ID NO: 9685 - DNA, 25 bp, Homo sapiens
atgatgtctgaagttattgctgcac

SEQ ID NO: 9686 - DNA, 25 bp, Homo sapiens
attctattcattatgccttaccatg

SEQ ID NO: 9687 - DNA, 25 bp, Homo sapiens
attgctgcacaattacccaagatat

SEQ ID NO: 9688 - DNA, 25 bp, Homo sapiens
ccagtcccgggcactgagtgttgaa

SEQ ID NO: 9689 - DNA, 25 bp, Homo sapiens
gatggagatcctacaaacacgtcag

SEQ ID NO: 9690 - DNA, 25 bp, Homo sapiens
gctcacagcgtttctatcaacttac

SEQ ID NO: 9691 - DNA, 25 bp, Homo sapiens
ggcagatcccacaggagtttgtcaa

SEQ ID NO: 9692 - DNA, 25 bp, Homo sapiens
tgccttaccatgtggcagatcccac

SEQ ID NO: 9693 - DNA, 25 bp, Homo sapiens
agaagtctctctctgacatggttcg

SEQ ID NO: 9694 - DNA, 25 bp, Homo sapiens
caaatgagactcccgcacgaaaacc

SEQ ID NO: 9695 - DNA, 25 bp, Homo sapiens
cggaaactgctagtagccctcttgc

SEQ ID NO: 9696 - DNA, 25 bp, Homo sapiens
ctcagatacctccggggacttccgg

SEQ ID NO: 9697 - DNA, 25 bp, Homo sapiens
ctcttgcactgagccaagccagggc

SEQ ID NO: 9698 - DNA, 25 bp, Homo sapiens
gcagcttaagtggcgcagccaggcc

SEQ ID NO: 9699 - DNA, 25 bp, Homo sapiens
gttgattcgcatagtcgtgaccagg

SEQ ID NO: 9700 - DNA, 25 bp, Homo sapiens
taagagtcccggattactttcttgg

SEQ ID NO: 9701 - DNA, 25 bp, Homo sapiens
taagatgcgtgggcagggcaccttg

SEQ ID NO: 9702 - DNA, 25 bp, Homo sapiens
tgcctcttcactttcttttagcatg

SEQ ID NO: 9703 - DNA, 25 bp, Homo sapiens
ttagcaagcatctaggctgcctctt

SEQ ID NO: 9704 - DNA, 25 bp, Homo sapiens
aacatttctcaataatttcctccac

SEQ ID NO: 9705 - DNA, 25 bp, Homo sapiens
atagtatccggagctctctcattgt

SEQ ID NO: 9706 - DNA, 25 bp, Homo sapiens
attaactcctcctgagctctgataa

SEQ ID NO: 9707 - DNA, 25 bp, Homo sapiens
gaactgcatagtatccggagctctc

SEQ ID NO: 9708 - DNA, 25 bp, Homo sapiens
gaggtagatttggctcctctgcttc

SEQ ID NO: 9709 - DNA, 25 bp, Homo sapiens
gggatggcaccgtaagtggagcctg

SEQ ID NO: 9710 - DNA, 25 bp, Homo sapiens
taaaggacttctgctttgctcttca

SEQ ID NO: 9711 - DNA, 25 bp, Homo sapiens
tttgctcttcagaaatctggtgcct

SEQ ID NO: 9712 - DNA, 25 bp, Homo sapiens
aagacagcagagctgctttccgcct

SEQ ID NO: 9713 - DNA, 25 bp, Homo sapiens
aggatgaagtttgcctgctactacc

SEQ ID NO: 9714 - DNA, 25 bp, Homo sapiens
atcgaggagatgccctctgaacgcc

SEQ ID NO: 9715 - DNA, 25 bp, Homo sapiens
caagtcctgcacttcaccaaggatg

SEQ ID NO: 9716 - DNA, 25 bp, Homo sapiens
caccaaggatgtcaaggccgctgct

SEQ ID NO: 9717 - DNA, 25 bp, Homo sapiens
ccaccttgtgttctgctgaagtctg

SEQ ID NO: 9718 - DNA, 25 bp, Homo sapiens
gctgaagtctgccagtgtgctgagg

SEQ ID NO: 9719 - DNA, 25 bp, Homo sapiens
gcttccaggttaaggttctccgaga

SEQ ID NO: 9720 - DNA, 25 bp, Homo sapiens
ggccgctgctaatcagatgcgcaac

SEQ ID NO: 9721 - DNA, 25 bp, Homo sapiens
tactacccccgtgtggagtacggct

SEQ ID NO: 9722 - DNA, 25 bp, Homo sapiens
tgagaccaagatcacccaagtcctg

SEQ ID NO: 9723 - DNA, 25 bp, Homo sapiens
aaatggaaggcaccgaagagccctg

SEQ ID NO: 9724 - DNA, 25 bp, Homo sapiens
aactttaaacttactgaccatctga

SEQ ID NO: 9725 - DNA, 25 bp, Homo sapiens
cctgtggctgaccaatacgattgca

SEQ ID NO: 9726 - DNA, 25 bp, Homo sapiens
ctggctggggacaaagtgacaactt

SEQ ID NO: 9727 - DNA, 25 bp, Homo sapiens
gaccaatacgattgcataacgcatt

SEQ ID NO: 9728 - DNA, 25 bp, Homo sapiens
gattgcataacgcattatgaaggca

SEQ ID NO: 9729 - DNA, 25 bp, Homo sapiens
ggcagcacatgccccaaatggaagg

SEQ ID NO: 9730 - DNA, 25 bp, Homo sapiens
gtgacaactttaaacttactgacca

SEQ ID NO: 9731 - DNA, 25 bp, Homo sapiens
gtggctgaccaatacgattgcataa

SEQ ID NO: 9732 - DNA, 25 bp, Homo sapiens
tatgaaggcagcacatgccccaaat

SEQ ID NO: 9733 - DNA, 25 bp, Homo sapiens
tgaaggcagcacatgccccaaatgg

SEQ ID NO: 9734 - DNA, 25 bp, Homo sapiens
aagccggttctcagttcagatgttc

SEQ ID NO: 9735 - DNA, 25 bp, Homo sapiens
aatgggcagtcctcggaaagccggt

SEQ ID NO: 9736 - DNA, 25 bp, Homo sapiens
agaccagaactacacgaatccttac

SEQ ID NO: 9737 - DNA, 25 bp, Homo sapiens
agtccgcagtgaagtaccggccatc

SEQ ID NO: 9738 - DNA, 25 bp, Homo sapiens
cgacctagcccgggttctagatttg

SEQ ID NO: 9739 - DNA, 25 bp, Homo sapiens
gagttcattgtcaggatggccctct

SEQ ID NO: 9740 - DNA, 25 bp, Homo sapiens
taatgaacagtgccagccttcttgc

SEQ ID NO: 9741 - DNA, 25 bp, Homo sapiens
tagatttggggcccatcactcggag

SEQ ID NO: 9742 - DNA, 25 bp, Homo sapiens
tgacctagttttcctgcattgtgag

SEQ ID NO: 9743 - DNA, 25 bp, Homo sapiens
ttgaactgtctgttgagtccgtgct

SEQ ID NO: 9744 - DNA, 25 bp, Homo sapiens
aaaaagaagcatattccgcggccac

SEQ ID NO: 9745 - DNA, 25 bp, Homo sapiens
aatgaccccagtgccagtgagcaca

SEQ ID NO: 9746 - DNA, 25 bp, Homo sapiens
ataggggcacagcccaatgacccca

SEQ ID NO: 9747 - DNA, 25 bp, Homo sapiens
catgatctactacgccgagaggata

SEQ ID NO: 9748 - DNA, 25 bp, Homo sapiens
cgcactttaagaacatccccatcgg

SEQ ID NO: 9749 - DNA, 25 bp, Homo sapiens
ctctccacaccacagtactcagagt

SEQ ID NO: 9750 - DNA, 25 bp, Homo sapiens
ggatgtattactccttagccatggc

SEQ ID NO: 9751 - DNA, 25 bp, Homo sapiens
taaatctgtcgtaaactctccacac

SEQ ID NO: 9752 - DNA, 25 bp, Homo sapiens
tcagagtgacacatgtccgctggcc

SEQ ID NO: 9753 - DNA, 25 bp, Homo sapiens
tgcccgtcatcgtgaacaatttcgg

SEQ ID NO: 9754 - DNA, 25 bp, Homo sapiens
ttgcgcatctttaagctgacccgcc

SEQ ID NO: 9755 - DNA, 25 bp, Homo sapiens
agtggcgtaagcgcgagcgtaacca

SEQ ID NO: 9756 - DNA, 25 bp, Homo sapiens
atgaccatgccgtccagcatgggcc

SEQ ID NO: 9757 - DNA, 25 bp, Homo sapiens
caaacagcactcgtcgtttggctac

SEQ ID NO: 9758 - DNA, 25 bp, Homo sapiens
cagctggacctgtgcaagggtggct

SEQ ID NO: 9759 - DNA, 25 bp, Homo sapiens
ccgcagttcagcggcctagtgcagc

SEQ ID NO: 9760 - DNA, 25 bp, Homo sapiens
ctcaacgcgtgccagtacaacagct

SEQ ID NO: 9761 - DNA, 25 bp, Homo sapiens
ggacctgtgcaagggtggctacgtg

SEQ ID NO: 9762 - DNA, 25 bp, Homo sapiens
taagcgcgagcgtaaccagcagctg

SEQ ID NO: 9763 - DNA, 25 bp, Homo sapiens
tagtgcagccctacgaggacgtgta

SEQ ID NO: 9764 - DNA, 25 bp, Homo sapiens
tcaagtccaaacagcactcgtcgtt

SEQ ID NO: 9765 - DNA, 25 bp, Homo sapiens
tggctacgtgccgcagttcagcggc

SEQ ID NO: 9766 - DNA, 25 bp, Homo sapiens
aaagattttgctctactcacacagt

SEQ ID NO: 9767 - DNA, 25 bp, Homo sapiens
aggagatcctccaggagttcaccct

SEQ ID NO: 9768 - DNA, 25 bp, Homo sapiens
catgaccattgggacgttcgggatc

SEQ ID NO: 9769 - DNA, 25 bp, Homo sapiens
catgttcgccgaggggactatgtcc

SEQ ID NO: 9770 - DNA, 25 bp, Homo sapiens
ccgcatacctcacgggcggagacac

SEQ ID NO: 9771 - DNA, 25 bp, Homo sapiens
ctcatcttcgtggtcaccagtaatg

SEQ ID NO: 9772 - DNA, 25 bp, Homo sapiens
gcacctttgtaggggtccatgttcg

SEQ ID NO: 9773 - DNA, 25 bp, Homo sapiens
gtaatggcatggcctggtgtcggga

SEQ ID NO: 9774 - DNA, 25 bp, Homo sapiens
tacctacagcaggccctggactggt

SEQ ID NO: 9775 - DNA, 25 bp, Homo sapiens
tgatgtggtgtttgctggcgatggc

SEQ ID NO: 9776 - DNA, 25 bp, Homo sapiens
ttcctgcggggcctgcaggtgaacg

SEQ ID NO: 9777 - DNA, 25 bp, Homo sapiens
aacagcagcagtgcaagcagccctg

SEQ ID NO: 9778 - DNA, 25 bp, Homo sapiens
acagcagcagtgcaagcagccctgc

SEQ ID NO: 9779 - DNA, 25 bp, Homo sapiens
atgtcttatcaacagcagcagtgca

SEQ ID NO: 9780 - DNA, 25 bp, Homo sapiens
caaagtatccaccgaagagcaagta

SEQ ID NO: 9781 - DNA, 25 bp, Homo sapiens
cagaaatatcctcctgtgacacctt

SEQ ID NO: 9782 - DNA, 25 bp, Homo sapiens
ccacctcagcagtgccagcagaaat

SEQ ID NO: 9783 - DNA, 25 bp, Homo sapiens
ccagccaaagtatccaccgaagagc

SEQ ID NO: 9784 - DNA, 25 bp, Homo sapiens
gcagtgccagcagaaatatcctcct

SEQ ID NO: 9785 - DNA, 25 bp, Homo sapiens
gccaaagtatccaccgaagagcaag

SEQ ID NO: 9786 - DNA, 25 bp, Homo sapiens
gccagcagaaatatcctcctgtgac

SEQ ID NO: 9787 - DNA, 25 bp, Homo sapiens
gtgccagcagaaatatcctcctgtg

SEQ ID NO: 9788 - DNA, 25 bp, Homo sapiens
aaaggatttcctacctggctgaagc

SEQ ID NO: 9789 - DNA, 25 bp, Homo sapiens
cagttcaagttccgggccaagttct

SEQ ID NO: 9790 - DNA, 25 bp, Homo sapiens
ccttagcgatgagatctactgcccc

SEQ ID NO: 9791 - DNA, 25 bp, Homo sapiens
gaaacttttcttcctccaagtgaag

SEQ ID NO: 9792 - DNA, 25 bp, Homo sapiens
gaagtgcacaagtctgggtacctca

SEQ ID NO: 9793 - DNA, 25 bp, Homo sapiens
gcatgcggaacaccgtgggatgctc

SEQ ID NO: 9794 - DNA, 25 bp, Homo sapiens
ggaaggagaatcccctccagttcaa

SEQ ID NO: 9795 - DNA, 25 bp, Homo sapiens
ggaccagcacaaacttaccagggac

SEQ ID NO: 9796 - DNA, 25 bp, Homo sapiens
gtacctcagctctgagcggctgatc

SEQ ID NO: 9797 - DNA, 25 bp, Homo sapiens
taaagactatcggcctccgggaagt

SEQ ID NO: 9798 - DNA, 25 bp, Homo sapiens
tcatccaggacatcacccagaaact

SEQ ID NO: 9799 - DNA, 25 bp, Homo sapiens
agttgaggccttctagttaccacat

SEQ ID NO: 9800 - DNA, 25 bp, Homo sapiens
agttgcagcccttgtgatgtgatta

SEQ ID NO: 9801 - DNA, 25 bp, Homo sapiens
atatcagtgacagttgcagcccttg

SEQ ID NO: 9802 - DNA, 25 bp, Homo sapiens
atgggtaaggacggactcacttctc

SEQ ID NO: 9803 - DNA, 25 bp, Homo sapiens
cacattactctgcctctgtatatag

SEQ ID NO: 9804 - DNA, 25 bp, Homo sapiens
gaaaagaccttttggcccaatctct

SEQ ID NO: 9805 - DNA, 25 bp, Homo sapiens
gcccaatctctgccatatcagtgaa

SEQ ID NO: 9806 - DNA, 25 bp, Homo sapiens
gtgattagtgtctcatgtggaacca

SEQ ID NO: 9807 - DNA, 25 bp, Homo sapiens
ttatatcacttcactgttctctact

SEQ ID NO: 9808 - DNA, 25 bp, Homo sapiens
ttcccttcatactccttttaagcag

SEQ ID NO: 9809 - DNA, 25 bp, Homo sapiens
ttttctgtggtcttactgatctttg

SEQ ID NO: 9810 - DNA, 25 bp, Homo sapiens
aaggagaggcaacatccaaaatagt

SEQ ID NO: 9811 - DNA, 25 bp, Homo sapiens
aatctactaattccacaccttttat

SEQ ID NO: 9812 - DNA, 25 bp, Homo sapiens
aatctgctggagtttcatgtacaag

SEQ ID NO: 9813 - DNA, 25 bp, Homo sapiens
agacatgatttccttgaatgtggct

SEQ ID NO: 9814 - DNA, 25 bp, Homo sapiens
gaaaatgttgagaatcccaaatttg

SEQ ID NO: 9815 - DNA, 25 bp, Homo sapiens
gaagaacatgtgagaggtttgacta

SEQ ID NO: 9816 - DNA, 25 bp, Homo sapiens
gagaggtttgactagatgatggatg

SEQ ID NO: 9817 - DNA, 25 bp, Homo sapiens
ggacacttaatactaccttgaaaat

SEQ ID NO: 9818 - DNA, 25 bp, Homo sapiens
ggatgccaatattaaatctgctgga

SEQ ID NO: 9819 - DNA, 25 bp, Homo sapiens
tactaattccacaccttttattgac

SEQ ID NO: 9820 - DNA, 25 bp, Homo sapiens
tggcttgagaaatatggacacttaa

SEQ ID NO: 9821 - DNA, 25 bp, Homo sapiens
aacactttttgttatcagtcaatat

SEQ ID NO: 9822 - DNA, 25 bp, Homo sapiens
aagtgggcttgattctgcagtaaat

SEQ ID NO: 9823 - DNA, 25 bp, Homo sapiens
aatagccacatttagaacacttttt

SEQ ID NO: 9824 - DNA, 25 bp, Homo sapiens
ctgggattacaggcttgagcccccg

SEQ ID NO: 9825 - DNA, 25 bp, Homo sapiens
gaacctggtcctaagcctaaaagtg

SEQ ID NO: 9826 - DNA, 25 bp, Homo sapiens
gatagttagaacctggtcctaagcc

SEQ ID NO: 9827 - DNA, 25 bp, Homo sapiens
gcgcccagccatcaaaatgcttttt

SEQ ID NO: 9828 - DNA, 25 bp, Homo sapiens
gctttttatttctgcatatgtttga

SEQ ID NO: 9829 - DNA, 25 bp, Homo sapiens
taaatcttttacaactgcctcgaca

SEQ ID NO: 9830 - DNA, 25 bp, Homo sapiens
tcacaaacttttatactctttctgt

SEQ ID NO: 9831 - DNA, 25 bp, Homo sapiens
tctgtatatacattttttttcttta

SEQ ID NO: 9832 - DNA, 25 bp, Homo sapiens
aatcaagttcttgaccctattcggc

SEQ ID NO: 9833 - DNA, 25 bp, Homo sapiens
aatcgttctccttacaatcaagttc

SEQ ID NO: 9834 - DNA, 25 bp, Homo sapiens
accactagtgtctgtccatggagtt

SEQ ID NO: 9835 - DNA, 25 bp, Homo sapiens
ataagctgtttgccacctcaaaact

SEQ ID NO: 9836 - DNA, 25 bp, Homo sapiens
atcctgcgcttgatcaactgaacca

SEQ ID NO: 9837 - DNA, 25 bp, Homo sapiens
cagtccaagattaccatttcccatg

SEQ ID NO: 9838 - DNA, 25 bp, Homo sapiens
gacacgaggcccttggcagggaata

SEQ ID NO: 9839 - DNA, 25 bp, Homo sapiens
tatgaacttcaccaccactagtgtc

SEQ ID NO: 9840 - DNA, 25 bp, Homo sapiens
tcacctctgtcgcttgggttaaaca

SEQ ID NO: 9841 - DNA, 25 bp, Homo sapiens
tgccttatcttcttccaaatgtact

SEQ ID NO: 9842 - DNA, 25 bp, Homo sapiens
ttcggccttatacatctggtcttac

SEQ ID NO: 9843 - DNA, 25 bp, Homo sapiens
aaattttggtcatagcattcacttt

SEQ ID NO: 9844 - DNA, 25 bp, Homo sapiens
aacacttgtatttggaggctcttct

SEQ ID NO: 9845 - DNA, 25 bp, Homo sapiens
aagtgctttgcattgaatttgggat

SEQ ID NO: 9846 - DNA, 25 bp, Homo sapiens
ccatggttgttgttagggatagtac

SEQ ID NO: 9847 - DNA, 25 bp, Homo sapiens
cttttgctattccaatctacaactg

SEQ ID NO: 9848 - DNA, 25 bp, Homo sapiens
gataacttcaaaaatcccatggttg

SEQ ID NO: 9849 - DNA, 25 bp, Homo sapiens
gcatgcattctagcacaacaagatg

SEQ ID NO: 9850 - DNA, 25 bp, Homo sapiens
gcattcacttttgctattccaatct

SEQ ID NO: 9851 - DNA, 25 bp, Homo sapiens
gggatagtactaagcatttcagttc

SEQ ID NO: 9852 - DNA, 25 bp, Homo sapiens
gtatttggaggctcttctgtgattt

SEQ ID NO: 9853 - DNA, 25 bp, Homo sapiens
tttgctctctagaaggaaacgtctt

SEQ ID NO: 9854 - DNA, 25 bp, Homo sapiens
acgtgcgggacgtggacatctgagg

SEQ ID NO: 9855 - DNA, 25 bp, Homo sapiens
ccaccgacgtgcgggacgtggacat

SEQ ID NO: 9856 - DNA, 25 bp, Homo sapiens
ccttccatctctgacttaagcaaaa

SEQ ID NO: 9857 - DNA, 25 bp, Homo sapiens
ctcctctccggagcattttgatacc

SEQ ID NO: 9858 - DNA, 25 bp, Homo sapiens
gcagatcgaagccctgctggagtca

SEQ ID NO: 9859 - DNA, 25 bp, Homo sapiens
ggcggaggagaacaaacagatcatc

SEQ ID NO: 9860 - DNA, 25 bp, Homo sapiens
taccagaagggaaagcttcattctc

SEQ ID NO: 9861 - DNA, 25 bp, Homo sapiens
tcattctccttgttgttggttgttt

SEQ ID NO: 9862 - DNA, 25 bp, Homo sapiens
tccggagcattttgataccagaagg

SEQ ID NO: 9863 - DNA, 25 bp, Homo sapiens
tcctctccagagtgatcaagtgtga

SEQ ID NO: 9864 - DNA, 25 bp, Homo sapiens
tggccgcagtgcaaggcctgaacct

SEQ ID NO: 9865 - DNA, 25 bp, Homo sapiens
aaccaaaagaatttgcaccccgctg

SEQ ID NO: 9866 - DNA, 25 bp, Homo sapiens
aatctgttatgtactagtgttctgt

SEQ ID NO: 9867 - DNA, 25 bp, Homo sapiens
actagtgttctgtttgttattgttt

SEQ ID NO: 9868 - DNA, 25 bp, Homo sapiens
agcaagctgccgaaccaaaagaatt

SEQ ID NO: 9869 - DNA, 25 bp, Homo sapiens
atctcaatgaagccagctcacagtg

SEQ ID NO: 9870 - DNA, 25 bp, Homo sapiens
cccggtcatctagcaagctgccgaa

SEQ ID NO: 9871 - DNA, 25 bp, Homo sapiens
cgcaagtctgagggtctgggcggcg

SEQ ID NO: 9872 - DNA, 25 bp, Homo sapiens
gacgcgcaagtctgagggtctgggc

SEQ ID NO: 9873 - DNA, 25 bp, Homo sapiens
gttttgggtatgtttaatctgttat

SEQ ID NO: 9874 - DNA, 25 bp, Homo sapiens
gttttgttaattacaccataatgct

SEQ ID NO: 9875 - DNA, 25 bp, Homo sapiens
tgcgggcccacgtggttggggccct

SEQ ID NO: 9876 - DNA, 25 bp, Homo sapiens
aatagtttcttcatactctgcatat

SEQ ID NO: 9877 - DNA, 25 bp, Homo sapiens
aatgtgtgtaatccttgttgctttc

SEQ ID NO: 9878 - DNA, 25 bp, Homo sapiens
aattgcctgaattgtactgtatgta

SEQ ID NO: 9879 - DNA, 25 bp, Homo sapiens
agctgcactacaacagattcttacc

SEQ ID NO: 9880 - DNA, 25 bp, Homo sapiens
atctgatttgctagttcttccttgt

SEQ ID NO: 9881 - DNA, 25 bp, Homo sapiens
caagacagctaacttcattttcaga

SEQ ID NO: 9882 - DNA, 25 bp, Homo sapiens
gatgtcaggtttagtcttctgaaga

SEQ ID NO: 9883 - DNA, 25 bp, Homo sapiens
gattcttaccgtctccacaaaggtc

SEQ ID NO: 9884 - DNA, 25 bp, Homo sapiens
gtaatccttgttgctttcctgatac

SEQ ID NO: 9885 - DNA, 25 bp, Homo sapiens
tgtttcccgtggttggttagaatat

SEQ ID NO: 9886 - DNA, 25 bp, Homo sapiens
ttttttattcccttgactcaagaca

SEQ ID NO: 9887 - DNA, 25 bp, Homo sapiens
aaactattacatcgtcagcccaaac

SEQ ID NO: 9888 - DNA, 25 bp, Homo sapiens
aacatctccttgcatttttgttggc

SEQ ID NO: 9889 - DNA, 25 bp, Homo sapiens
acctccacaagtcgtccgagtagga

SEQ ID NO: 9890 - DNA, 25 bp, Homo sapiens
acgactctatttcctacagtgcgaa

SEQ ID NO: 9891 - DNA, 25 bp, Homo sapiens
cacagctccgtgccaaagctaacta

SEQ ID NO: 9892 - DNA, 25 bp, Homo sapiens
cacatgccgatcaccggacacaatc

SEQ ID NO: 9893 - DNA, 25 bp, Homo sapiens
ccagtatcaaaaccggcttccaggc

SEQ ID NO: 9894 - DNA, 25 bp, Homo sapiens
ctgtcacgggcaagcgagcacagct

SEQ ID NO: 9895 - DNA, 25 bp, Homo sapiens
ggagctgctgaatcgagtgttcaac

SEQ ID NO: 9896 - DNA, 25 bp, Homo sapiens
ggctggacaggtttgccatcagagt

SEQ ID NO: 9897 - DNA, 25 bp, Homo sapiens
tcctgcagaaggacacacgactcta

SEQ ID NO: 9898 - DNA, 25 bp, Homo sapiens
gagtatccacatttagatggcacat

SEQ ID NO: 9899 - DNA, 25 bp, Homo sapiens
gctttgtccacaatttccttaagac

SEQ ID NO: 9900 - DNA, 25 bp, Homo sapiens
ggctttgtatatgttaacctgtttt

SEQ ID NO: 9901 - DNA, 25 bp, Homo sapiens
gtggcaacctctataatctttaaaa

SEQ ID NO: 9902 - DNA, 25 bp, Homo sapiens
tatggtgagcatcttgtctgttttg

SEQ ID NO: 9903 - DNA, 25 bp, Homo sapiens
tcaaccttgatgtacagtgactgtg

SEQ ID NO: 9904 - DNA, 25 bp, Homo sapiens
tgttcatcttttcttgtcactagtc

SEQ ID NO: 9905 - DNA, 25 bp, Homo sapiens
ttgccttaatgaatactgttgggaa

SEQ ID NO: 9906 - DNA, 25 bp, Homo sapiens
tttctacatcttagcgactccaaga

SEQ ID NO: 9907 - DNA, 25 bp, Homo sapiens
tttctttcagtggcaacctctataa

SEQ ID NO: 9908 - DNA, 25 bp, Homo sapiens
ttttcatgcaggacagtttttcaac

SEQ ID NO: 9909 - DNA, 25 bp, Homo sapiens
acacacaaggcctgatcttcgtggt

SEQ ID NO: 9910 - DNA, 25 bp, Homo sapiens
agagagcgtgtgaacgaggcccgtg

SEQ ID NO: 9911 - DNA, 25 bp, Homo sapiens
caatgaggcagtttctggtactcct

SEQ ID NO: 9912 - DNA, 25 bp, Homo sapiens
cccaacgccatgaatgcggccgaga

SEQ ID NO: 9913 - DNA, 25 bp, Homo sapiens
cctctgctttactctcatgtggcaa

SEQ ID NO: 9914 - DNA, 25 bp, Homo sapiens
ctgcggccaggctttttatttaatg

SEQ ID NO: 9915 - DNA, 25 bp, Homo sapiens
gaggcccgtgaggagctcatgagga

SEQ ID NO: 9916 - DNA, 25 bp, Homo sapiens
gtgtgcatcgcaccgtgctgtaaat

SEQ ID NO: 9917 - DNA, 25 bp, Homo sapiens
taaatgtggcagacgcagcctgcgg

SEQ ID NO: 9918 - DNA, 25 bp, Homo sapiens
tcatgaggatgctggccgaggacga

SEQ ID NO: 9919 - DNA, 25 bp, Homo sapiens
tcatgtggcaaacgtgcggctcgtg

SEQ ID NO: 9920 - DNA, 25 bp, Homo sapiens
aagtaacggatgtttctcgccaatc

SEQ ID NO: 9921 - DNA, 25 bp, Homo sapiens
agaggagagctctgaaacgcggtca

SEQ ID NO: 9922 - DNA, 25 bp, Homo sapiens
ctcggtctgacgtctgatgtttgtg

SEQ ID NO: 9923 - DNA, 25 bp, Homo sapiens
ctgaaacgcggtcacctttgtttag

SEQ ID NO: 9924 - DNA, 25 bp, Homo sapiens
gactccagccgctgttggctgggaa

SEQ ID NO: 9925 - DNA, 25 bp, Homo sapiens
ggcaatggattaaccactgtatcta

SEQ ID NO: 9926 - DNA, 25 bp, Homo sapiens
ggtcctcggcctaacgaaggacgtg

SEQ ID NO: 9927 - DNA, 25 bp, Homo sapiens
ggtttgaatatttgtagcccgctcc

SEQ ID NO: 9928 - DNA, 25 bp, Homo sapiens
tctcgccaatcgtagtgacttcagc

SEQ ID NO: 9929 - DNA, 25 bp, Homo sapiens
ttcccggcatgaggtgcctcggaat

SEQ ID NO: 9930 - DNA, 25 bp, Homo sapiens
ttcttttgtagtaccacggtcctcg

SEQ ID NO: 9931 - DNA, 25 bp, Homo sapiens
acaactctggcttttgagatgactt

SEQ ID NO: 9932 - DNA, 25 bp, Homo sapiens
atcatcccattgtaaagcgacttca

SEQ ID NO: 9933 - DNA, 25 bp, Homo sapiens
atttgtgagccttcattaactcgaa

SEQ ID NO: 9934 - DNA, 25 bp, Homo sapiens
gaatcgtttgtctagactacatgta

SEQ ID NO: 9935 - DNA, 25 bp, Homo sapiens
gatcatgtgcatatcatcccattgt

SEQ ID NO: 9936 - DNA, 25 bp, Homo sapiens
gcacctcttggactgaatcgtttgt

SEQ ID NO: 9937 - DNA, 25 bp, Homo sapiens
gcattgtctgaagttagcacctctt

SEQ ID NO: 9938 - DNA, 25 bp, Homo sapiens
gtcgcttgtcgacaacagctttttg

SEQ ID NO: 9939 - DNA, 25 bp, Homo sapiens
gtgtgtgctgtcgcttgtcgacaac

SEQ ID NO: 9940 - DNA, 25 bp, Homo sapiens
gttagaataggctgcatctttttaa

SEQ ID NO: 9941 - DNA, 25 bp, Homo sapiens
tagggagcattttccttctagtcta

SEQ ID NO: 9942 - DNA, 25 bp, Homo sapiens
aaagccatgttgactattttacagc

SEQ ID NO: 9943 - DNA, 25 bp, Homo sapiens
aaatgctttgtaccagagcacctcc

SEQ ID NO: 9944 - DNA, 25 bp, Homo sapiens
acagccactggagttaactaaccct

SEQ ID NO: 9945 - DNA, 25 bp, Homo sapiens
acctgccttttactttcgtgtggat

SEQ ID NO: 9946 - DNA, 25 bp, Homo sapiens
cagagcacctccaaactgcattgag

SEQ ID NO: 9947 - DNA, 25 bp, Homo sapiens
gaataatgtgccagttttttgtagc

SEQ ID NO: 9948 - DNA, 25 bp, Homo sapiens
gggtcgggaactagctgtagaacac

SEQ ID NO: 9949 - DNA, 25 bp, Homo sapiens
gttacaccatccattctgttaattt

SEQ ID NO: 9950 - DNA, 25 bp, Homo sapiens
tatgtgaagcattgggtcgggaact

SEQ ID NO: 9951 - DNA, 25 bp, Homo sapiens
tgcaatatgctaatcccactttaca

SEQ ID NO: 9952 - DNA, 25 bp, Homo sapiens
tttcttttgatgtccagttacacca

SEQ ID NO: 9953 - DNA, 25 bp, Homo sapiens
acatggtctgtcctgacagcactcc

SEQ ID NO: 9954 - DNA, 25 bp, Homo sapiens
cctcggcaggcatggctggtgcctg

SEQ ID NO: 9955 - DNA, 25 bp, Homo sapiens
cttgcccatcgggaccagaaacctg

SEQ ID NO: 9956 - DNA, 25 bp, Homo sapiens
gaagcctcaagttccagtgcagaga

SEQ ID NO: 9957 - DNA, 25 bp, Homo sapiens
gagatcctacttctctgagtcagct

SEQ ID NO: 9958 - DNA, 25 bp, Homo sapiens
gagttccagtgctgcatgcgattat

SEQ ID NO: 9959 - DNA, 25 bp, Homo sapiens
ggatgaggagtggttgggctgtgcc

SEQ ID NO: 9960 - DNA, 25 bp, Homo sapiens
ggcctagcacggacatggtctgtcc

SEQ ID NO: 9961 - DNA, 25 bp, Homo sapiens
gtgctgcatgcgattatctacccac

SEQ ID NO: 9962 - DNA, 25 bp, Homo sapiens
gtgggatggtggggtaccagccact

SEQ ID NO: 9963 - DNA, 25 bp, Homo sapiens
ttgtactttttgttccagagctgct

SEQ ID NO: 9964 - DNA, 25 bp, Homo sapiens
atacctttccagggtcaaagtacag

SEQ ID NO: 9965 - DNA, 25 bp, Homo sapiens
attacgtgtatgtttcttctttctt

SEQ ID NO: 9966 - DNA, 25 bp, Homo sapiens
catggcacgtgagctccggaataga

SEQ ID NO: 9967 - DNA, 25 bp, Homo sapiens
gaagtctaattcacaggcaaaccaa

SEQ ID NO: 9968 - DNA, 25 bp, Homo sapiens
gcaggtggcttgttaaggaacgcta

SEQ ID NO: 9969 - DNA, 25 bp, Homo sapiens
gcttgcagtccgttgctgaaaatga

SEQ ID NO: 9970 - DNA, 25 bp, Homo sapiens
ggaatagatgtcttcatcacttctt

SEQ ID NO: 9971 - DNA, 25 bp, Homo sapiens
gtgtgttgacactgttttccttacc

SEQ ID NO: 9972 - DNA, 25 bp, Homo sapiens
taagccttcatttgcaattcatgta

SEQ ID NO: 9973 - DNA, 25 bp, Homo sapiens
tcacagtgcagcttgcagtccgttg

SEQ ID NO: 9974 - DNA, 25 bp, Homo sapiens
ttttaagcagacccatacctttcca

SEQ ID NO: 9975 - DNA, 25 bp, Homo sapiens
aacaatcttaagagcttgatctgtg

SEQ ID NO: 9976 - DNA, 25 bp, Homo sapiens
aacttcaagacatcaccatcagcag

SEQ ID NO: 9977 - DNA, 25 bp, Homo sapiens
aagaaaactgatgcacctcaaccgg

SEQ ID NO: 9978 - DNA, 25 bp, Homo sapiens
catcagcaggctccagttgaacact

SEQ ID NO: 9979 - DNA, 25 bp, Homo sapiens
ctcccctgcaagagtggtcctagga

SEQ ID NO: 9980 - DNA, 25 bp, Homo sapiens
gaagatggtggcactgtcagtcaag

SEQ ID NO: 9981 - DNA, 25 bp, Homo sapiens
gatataaaggaccctgtttctgtag

SEQ ID NO: 9982 - DNA, 25 bp, Homo sapiens
gatcaccaagaaacagaaagccacg

SEQ ID NO: 9983 - DNA, 25 bp, Homo sapiens
gatgcacctcaaccggatgtgaagg

SEQ ID NO: 9984 - DNA, 25 bp, Homo sapiens
ggacctggcacaccttaggttgaca

SEQ ID NO: 9985 - DNA, 25 bp, Homo sapiens
gttgaacactagtctgtgtaacttt

SEQ ID NO: 9986 - DNA, 25 bp, Homo sapiens
aaggttgtggtgtagttggtctgta

SEQ ID NO: 9987 - DNA, 25 bp, Homo sapiens
cacttaaggctccacagtggcttac

SEQ ID NO: 9988 - DNA, 25 bp, Homo sapiens
gaagacacatcactctgaaattgga

SEQ ID NO: 9989 - DNA, 25 bp, Homo sapiens
gaatgctgttactaatcctgttacg

SEQ ID NO: 9990 - DNA, 25 bp, Homo sapiens
gagctggaatcccattgatcttcta

SEQ ID NO: 9991 - DNA, 25 bp, Homo sapiens
gcacttagactatgcactttttctg

SEQ ID NO: 9992 - DNA, 25 bp, Homo sapiens
gggagatggccattctaactactgt

SEQ ID NO: 9993 - DNA, 25 bp, Homo sapiens
ggtgttttttgtcctggtatatcgt

SEQ ID NO: 9994 - DNA, 25 bp, Homo sapiens
tgaatgtctctgttttgggaaggta

SEQ ID NO: 9995 - DNA, 25 bp, Homo sapiens
tgatcttctagctaccattcatttt

SEQ ID NO: 9996 - DNA, 25 bp, Homo sapiens
tggtatatcgtcattccatctgcag

SEQ ID NO: 9997 - DNA, 25 bp, Homo sapiens
acaatatctagtactgcaactgcca

SEQ ID NO: 9998 - DNA, 25 bp, Homo sapiens
aggttcagtgattgttgaccctccc

SEQ ID NO: 9999 - DNA, 25 bp, Homo sapiens
atggtattcctttgcaagtcaattt

SEQ ID NO: 10000 - DNA, 25 bp, Homo sapiens
ccctcctgcttctttaagttatctg

SEQ ID NO: 10001 - DNA, 25 bp, Homo sapiens
ctggaaatgctgccgggagcctatt

SEQ ID NO: 10002 - DNA, 25 bp, Homo sapiens
gcaactgccagaacttggtattgta

SEQ ID NO: 10003 - DNA, 25 bp, Homo sapiens
gcaagtcaatttaggtttcgtgtta

SEQ ID NO: 10004 - DNA, 25 bp, Homo sapiens
gcccgctgactagcagctggactga

SEQ ID NO: 10005 - DNA, 25 bp, Homo sapiens
taagttatctgtgtgcgtgcgcttc

SEQ ID NO: 10006 - DNA, 25 bp, Homo sapiens
tataagcagttgactttcacccttg

SEQ ID NO: 10007 - DNA, 25 bp, Homo sapiens
tttcacccttggagagcatcacact

SEQ ID NO: 10008 - DNA, 25 bp, Homo sapiens
aaagatacgactgaggcgcctacct

SEQ ID NO: 10009 - DNA, 25 bp, Homo sapiens
actggtctatctctatcctgacatt

SEQ ID NO: 10010 - DNA, 25 bp, Homo sapiens
agtccctcacctttgacatggagtt

SEQ ID NO: 10011 - DNA, 25 bp, Homo sapiens
atggagttgacctcggagtgcgcta

SEQ ID NO: 10012 - DNA, 25 bp, Homo sapiens
caccaacgacctgcagcaataccat

SEQ ID NO: 10013 - DNA, 25 bp, Homo sapiens
cccccgcactttagattcattgatg

SEQ ID NO: 10014 - DNA, 25 bp, Homo sapiens
gaccaagtttatctgtgtgacacca

SEQ ID NO: 10015 - DNA, 25 bp, Homo sapiens
gcaataccattgacctgccgatgtc

SEQ ID NO: 10016 - DNA, 25 bp, Homo sapiens
ggagggcagtttgagtccctcacct

SEQ ID NO: 10017 - DNA, 25 bp, Homo sapiens
gtcggccagagagccaggagcatcc

SEQ ID NO: 10018 - DNA, 25 bp, Homo sapiens
tctcctacttctgctatctttgagc

SEQ ID NO: 10019 - DNA, 25 bp, Homo sapiens
aggatgccaacgccaagttgtccga

SEQ ID NO: 10020 - DNA, 25 bp, Homo sapiens
cggcagctgcgtgagtaccaggagc

SEQ ID NO: 10021 - DNA, 25 bp, Homo sapiens
gagcagcgtggagagctggccatta

SEQ ID NO: 10022 - DNA, 25 bp, Homo sapiens
gcccaagtgaacagctgcggcagcc

SEQ ID NO: 10023 - DNA, 25 bp, Homo sapiens
gccggctccaggctgagattgaggg

SEQ ID NO: 10024 - DNA, 25 bp, Homo sapiens
gcggctatgcaggtggtctgagctc

SEQ ID NO: 10025 - DNA, 25 bp, Homo sapiens
gggccaagcaggacatggcgcggca

SEQ ID NO: 10026 - DNA, 25 bp, Homo sapiens
tcctccagggccgtggttgtgaaga

SEQ ID NO: 10027 - DNA, 25 bp, Homo sapiens
tcgccacctacaggaagctgctgga

SEQ ID NO: 10028 - DNA, 25 bp, Homo sapiens
tgaaccggaacatcagccggctcca

SEQ ID NO: 10029 - DNA, 25 bp, Homo sapiens
tgggaagctggtgtctgagtcctct

SEQ ID NO: 10030 - DNA, 25 bp, Homo sapiens
aaaagccgattaagcactggccgcc

SEQ ID NO: 10031 - DNA, 25 bp, Homo sapiens
aactcaaggaggctgggtttctggg

SEQ ID NO: 10032 - DNA, 25 bp, Homo sapiens
aactggatgtgtattcgtaacctca

SEQ ID NO: 10033 - DNA, 25 bp, Homo sapiens
actggcgtagttaagctttgcagct

SEQ ID NO: 10034 - DNA, 25 bp, Homo sapiens
ccaatgcccgagtcactgtggcagc

SEQ ID NO: 10035 - DNA, 25 bp, Homo sapiens
ccagccagacacctgggtcttgagc

SEQ ID NO: 10036 - DNA, 25 bp, Homo sapiens
ctttttatctttctcgtgtgaactg

SEQ ID NO: 10037 - DNA, 25 bp, Homo sapiens
gaagttttctggatgtctttttatc

SEQ ID NO: 10038 - DNA, 25 bp, Homo sapiens
gcagcattcgcactggtgtggggag

SEQ ID NO: 10039 - DNA, 25 bp, Homo sapiens
gggtcttgagccataaactggcgta

SEQ ID NO: 10040 - DNA, 25 bp, Homo sapiens
gtggggagtcctttcaactcaagga

SEQ ID NO: 10041 - DNA, 25 bp, Homo sapiens
agaagcggaccttcaccaagggagt

SEQ ID NO: 10042 - DNA, 25 bp, Homo sapiens
atccctgaaaacgccaacgtcttct

SEQ ID NO: 10043 - DNA, 25 bp, Homo sapiens
caacgggcatggcatggtgccctgc

SEQ ID NO: 10044 - DNA, 25 bp, Homo sapiens
ccctccctcgcatgaagcagaaagg

SEQ ID NO: 10045 - DNA, 25 bp, Homo sapiens
gacaccttcccaggtgtgggtcact

SEQ ID NO: 10046 - DNA, 25 bp, Homo sapiens
gaggactagctgacttttgccaagg

SEQ ID NO: 10047 - DNA, 25 bp, Homo sapiens
gccaaggagcagtgccaacgggcat

SEQ ID NO: 10048 - DNA, 25 bp, Homo sapiens
gctgcagattctctcagatgaccgg

SEQ ID NO: 10049 - DNA, 25 bp, Homo sapiens
ggtctggctggctggtagccaagca

SEQ ID NO: 10050 - DNA, 25 bp, Homo sapiens
tgaaggtcaagcacggagccagctc

SEQ ID NO: 10051 - DNA, 25 bp, Homo sapiens
ttgacgcctgccattggtcaggctg

SEQ ID NO: 10052 - DNA, 25 bp, Homo sapiens
aacgagcagggtgttttctctcttc

SEQ ID NO: 10053 - DNA, 25 bp, Homo sapiens
actgctttgctgaccattttggatg

SEQ ID NO: 10054 - DNA, 25 bp, Homo sapiens
agttctttgatccagaggtgggtgc

SEQ ID NO: 10055 - DNA, 25 bp, Homo sapiens
atctgaggtgagttgggggtatcta

SEQ ID NO: 10056 - DNA, 25 bp, Homo sapiens
atgggggatggtgagctgtgactgc

SEQ ID NO: 10057 - DNA, 25 bp, Homo sapiens
caggaattgacttatactcttgaga

SEQ ID NO: 10058 - DNA, 25 bp, Homo sapiens
ccagttccctttttatttgcagaag

SEQ ID NO: 10059 - DNA, 25 bp, Homo sapiens
gaggtgggtgcagctgaaagtaaac

SEQ ID NO: 10060 - DNA, 25 bp, Homo sapiens
ggcttgatgtcctagaagttctttg

SEQ ID NO: 10061 - DNA, 25 bp, Homo sapiens
tgccagttacatgtatgcctgccca

SEQ ID NO: 10062 - DNA, 25 bp, Homo sapiens
ttttgttcacaattaggttcctagg

SEQ ID NO: 10063 - DNA, 25 bp, Homo sapiens
agacacacgggctgagcagacggcc

SEQ ID NO: 10064 - DNA, 25 bp, Homo sapiens
cagcagaagcactctgcgtcgctga

SEQ ID NO: 10065 - DNA, 25 bp, Homo sapiens
ctcccgaattactcaccgagacaca

SEQ ID NO: 10066 - DNA, 25 bp, Homo sapiens
gaagataaccggctcattcacttcc

SEQ ID NO: 10067 - DNA, 25 bp, Homo sapiens
gcacgtgctgtgacgatggctgaac

SEQ ID NO: 10068 - DNA, 25 bp, Homo sapiens
gcgagtaggcacaggcgtgcacctg

SEQ ID NO: 10069 - DNA, 25 bp, Homo sapiens
tcaccctccccgaggacggagatga

SEQ ID NO: 10070 - DNA, 25 bp, Homo sapiens
tgacccaccttttgattttagcgca

SEQ ID NO: 10071 - DNA, 25 bp, Homo sapiens
tgccaaaacgcgtcttcttaatcca

SEQ ID NO: 10072 - DNA, 25 bp, Homo sapiens
ttcctcccagaagacgcgtggtagc

SEQ ID NO: 10073 - DNA, 25 bp, Homo sapiens
ttctgaccatatccttcttaacacc

SEQ ID NO: 10074 - DNA, 25 bp, Homo sapiens
accccagggattgcccgtgaagact

SEQ ID NO: 10075 - DNA, 25 bp, Homo sapiens
agacagctgtttagggtcttctccc

SEQ ID NO: 10076 - DNA, 25 bp, Homo sapiens
agcagggcgagagtgcccagggctg

SEQ ID NO: 10077 - DNA, 25 bp, Homo sapiens
agctcccaggtaaggcggaggctgc

SEQ ID NO: 10078 - DNA, 25 bp, Homo sapiens
atattggaaatatcacccctgaagc

SEQ ID NO: 10079 - DNA, 25 bp, Homo sapiens
gcatttcttaccagtgtgaccacac

SEQ ID NO: 10080 - DNA, 25 bp, Homo sapiens
ggattgcccgtgaagactttggcct

SEQ ID NO: 10081 - DNA, 25 bp, Homo sapiens
ggtgcctcacaaacttgattgtgca

SEQ ID NO: 10082 - DNA, 25 bp, Homo sapiens
ggtgtgaggaccatgctgtgagcag

SEQ ID NO: 10083 - DNA, 25 bp, Homo sapiens
gtgttggttatgtgagtgttgtttt

SEQ ID NO: 10084 - DNA, 25 bp, Homo sapiens
tgattgccaatctgcatttcttacc

SEQ ID NO: 10085 - DNA, 25 bp, Homo sapiens
aacatcttcatgtgggctggggtag

SEQ ID NO: 10086 - DNA, 25 bp, Homo sapiens
atcactagtgcatgctgtggccaga

SEQ ID NO: 10087 - DNA, 25 bp, Homo sapiens
caggagacccagcgatctgagcata

SEQ ID NO: 10088 - DNA, 25 bp, Homo sapiens
gaaaaggcgtcttcactgctttatc

SEQ ID NO: 10089 - DNA, 25 bp, Homo sapiens
gagtctcagaatgctcaggaccaag

SEQ ID NO: 10090 - DNA, 25 bp, Homo sapiens
gctttatctcatgatgcttgcttgt

SEQ ID NO: 10091 - DNA, 25 bp, Homo sapiens
ggggtagaaactggtgtctgctctg

SEQ ID NO: 10092 - DNA, 25 bp, Homo sapiens
gtctgctctggtgtgatctgaaaag

SEQ ID NO: 10093 - DNA, 25 bp, Homo sapiens
tatggccattgtgttgcctctgtta

SEQ ID NO: 10094 - DNA, 25 bp, Homo sapiens
tatgttctcattctatggccattgt

SEQ ID NO: 10095 - DNA, 25 bp, Homo sapiens
tgtggccagacagatgacacctttt

SEQ ID NO: 10096 - DNA, 25 bp, Homo sapiens
aaattattaatttcttgcctccagt

SEQ ID NO: 10097 - DNA, 25 bp, Homo sapiens
aagcacaagtgactagtcctatgat

SEQ ID NO: 10098 - DNA, 25 bp, Homo sapiens
actggagcttcactttgttactaaa

SEQ ID NO: 10099 - DNA, 25 bp, Homo sapiens
ccactggagcttcactttgttacta

SEQ ID NO: 10100 - DNA, 25 bp, Homo sapiens
cctgtatctctgtgatgatttctgt

SEQ ID NO: 10101 - DNA, 25 bp, Homo sapiens
gaaagcacaagtgactagtcctatg

SEQ ID NO: 10102 - DNA, 25 bp, Homo sapiens
gcttcactttgttactaaattatta

SEQ ID NO: 10103 - DNA, 25 bp, Homo sapiens
ggagcttcactttgttactaaatta

SEQ ID NO: 10104 - DNA, 25 bp, Homo sapiens
tattaatttcttgcctccagtgttc

SEQ ID NO: 10105 - DNA, 25 bp, Homo sapiens
tcaccatcagatcaacctctgattt

SEQ ID NO: 10106 - DNA, 25 bp, Homo sapiens
tgctcaccatcagatcaacctctga

SEQ ID NO: 10107 - DNA, 25 bp, Homo sapiens
acctaccgcaagctgctggagggcg

SEQ ID NO: 10108 - DNA, 25 bp, Homo sapiens
actcctatggcagtggtcttggcgt

SEQ ID NO: 10109 - DNA, 25 bp, Homo sapiens
caccgtctccagtggctatggcggt

SEQ ID NO: 10110 - DNA, 25 bp, Homo sapiens
gacaagtcaacatctctgtagtgca

SEQ ID NO: 10111 - DNA, 25 bp, Homo sapiens
gaggatgccctgcagaaggccaagc

SEQ ID NO: 10112 - DNA, 25 bp, Homo sapiens
gcccggctgctgaaggagtaccagg

SEQ ID NO: 10113 - DNA, 25 bp, Homo sapiens
gccgccattgctgatgctgagcagc

SEQ ID NO: 10114 - DNA, 25 bp, Homo sapiens
tgccagcggtgtcggcagtggctta

SEQ ID NO: 10115 - DNA, 25 bp, Homo sapiens
tggccctggacgtggagatcgccac

SEQ ID NO: 10116 - DNA, 25 bp, Homo sapiens
ttggcgttggaggcggctttagttc

SEQ ID NO: 10117 - DNA, 25 bp, Homo sapiens
tttagttccagcagcggcagagcca

SEQ ID NO: 10118 - DNA, 25 bp, Homo sapiens
aaagctgtgctgtcggtgatacaga

SEQ ID NO: 10119 - DNA, 25 bp, Homo sapiens
aataattttctaaagctgtgctgtc

SEQ ID NO: 10120 - DNA, 25 bp, Homo sapiens
aatgagccttgtgtttacaaatatg

SEQ ID NO: 10121 - DNA, 25 bp, Homo sapiens
agtaagttttgctggatttttgtag

SEQ ID NO: 10122 - DNA, 25 bp, Homo sapiens
atatctgaattaatgagccttgtgt

SEQ ID NO: 10123 - DNA, 25 bp, Homo sapiens
atatgtgccattgtgcaacatcggt

SEQ ID NO: 10124 - DNA, 25 bp, Homo sapiens
cgatgtgtaatgaaacctgaaataa

SEQ ID NO: 10125 - DNA, 25 bp, Homo sapiens
gaactctggacgttgaggattcatt

SEQ ID NO: 10126 - DNA, 25 bp, Homo sapiens
gctggatttttgtagaactctggac

SEQ ID NO: 10127 - DNA, 25 bp, Homo sapiens
gtcggtgatacagagacgatactca

SEQ ID NO: 10128 - DNA, 25 bp, Homo sapiens
gtgcaacatcggtggattttctaaa

SEQ ID NO: 10129 - DNA, 25 bp, Homo sapiens
atgtttttatcgtactctttggaga

SEQ ID NO: 10130 - DNA, 25 bp, Homo sapiens
cacaagccttactttggttaccgtg

SEQ ID NO: 10131 - DNA, 25 bp, Homo sapiens
gcaagtgcacaagccttactttggt

SEQ ID NO: 10132 - DNA, 25 bp, Homo sapiens
gctcagcaagtgcacaagccttact

SEQ ID NO: 10133 - DNA, 25 bp, Homo sapiens
ggagatgcccattctacttttgaat

SEQ ID NO: 10134 - DNA, 25 bp, Homo sapiens
gtgcacaagccttactttggttacc

SEQ ID NO: 10135 - DNA, 25 bp, Homo sapiens
tactctttggagatgcccattctac

SEQ ID NO: 10136 - DNA, 25 bp, Homo sapiens
tagcttttactaattcgcatctgga

SEQ ID NO: 10137 - DNA, 25 bp, Homo sapiens
tatcgtactctttggagatgcccat

SEQ ID NO: 10138 - DNA, 25 bp, Homo sapiens
ttggagatgcccattctacttttga

SEQ ID NO: 10139 - DNA, 25 bp, Homo sapiens
tttactaattcgcatctggaagctc

SEQ ID NO: 10140 - DNA, 25 bp, Homo sapiens
aacgacagtctgcacgagtcggcgc

SEQ ID NO: 10141 - DNA, 25 bp, Homo sapiens
accccgtccatggtgctaagcgggc

SEQ ID NO: 10142 - DNA, 25 bp, Homo sapiens
acgtggacatggacgtgctcaccac

SEQ ID NO: 10143 - DNA, 25 bp, Homo sapiens
cacgagaaggactatgacagcctgg

SEQ ID NO: 10144 - DNA, 25 bp, Homo sapiens
cccgtccatggtgctaagcgggccc

SEQ ID NO: 10145 - DNA, 25 bp, Homo sapiens
gcaacgacagtctgcacgagtcggc

SEQ ID NO: 10146 - DNA, 25 bp, Homo sapiens
gcacgccatcaatgccatcgtgcgc

SEQ ID NO: 10147 - DNA, 25 bp, Homo sapiens
gcgacgtggacatggacgtgctcac

SEQ ID NO: 10148 - DNA, 25 bp, Homo sapiens
gggcaacgacagtctgcacgagtcg

SEQ ID NO: 10149 - DNA, 25 bp, Homo sapiens
gggcagcgacgtggacatggacgtg

SEQ ID NO: 10150 - DNA, 25 bp, Homo sapiens
tcacgggcaacgacagtctgcacga

SEQ ID NO: 10151 - DNA, 25 bp, Homo sapiens
aaatctccactattttaacagtgat

SEQ ID NO: 10152 - DNA, 25 bp, Homo sapiens
acagctgagtccataggccagaaag

SEQ ID NO: 10153 - DNA, 25 bp, Homo sapiens
acgcagaggacgtctctatgccggt

SEQ ID NO: 10154 - DNA, 25 bp, Homo sapiens
acgtgcaggtttttgagttccagtt

SEQ ID NO: 10155 - DNA, 25 bp, Homo sapiens
agttccagttgactgcagaggacat

SEQ ID NO: 10156 - DNA, 25 bp, Homo sapiens
atgtcatccgtatttcaaccggagt

SEQ ID NO: 10157 - DNA, 25 bp, Homo sapiens
cagtcaactacagctgagtccatag

SEQ ID NO: 10158 - DNA, 25 bp, Homo sapiens
cggagtaaattgctagatttctgca

SEQ ID NO: 10159 - DNA, 25 bp, Homo sapiens
ggcctagacagaaatctccactatt

SEQ ID NO: 10160 - DNA, 25 bp, Homo sapiens
gtgctctgggatctcaacgagacaa

SEQ ID NO: 10161 - DNA, 25 bp, Homo sapiens
tagccaccctaattatccatattca

SEQ ID NO: 10162 - DNA, 25 bp, Homo sapiens
aaaataggcctggacctgaaggtct

SEQ ID NO: 10163 - DNA, 25 bp, Homo sapiens
aaaatggtctttgcacacactacac

SEQ ID NO: 10164 - DNA, 25 bp, Homo sapiens
aacagagactgcatgctttgcttat

SEQ ID NO: 10165 - DNA, 25 bp, Homo sapiens
aggaaagaagtgtttgccgcatcaa

SEQ ID NO: 10166 - DNA, 25 bp, Homo sapiens
atatacaatgtgctcccgaactttc

SEQ ID NO: 10167 - DNA, 25 bp, Homo sapiens
gcatgctttgcttatagttcttaat

SEQ ID NO: 10168 - DNA, 25 bp, Homo sapiens
gctagttctcaagctgcatgtaaga

SEQ ID NO: 10169 - DNA, 25 bp, Homo sapiens
gctcccgaactttcgcattagtctt

SEQ ID NO: 10170 - DNA, 25 bp, Homo sapiens
gtgtttgccgcatcaagtgtaaaga

SEQ ID NO: 10171 - DNA, 25 bp, Homo sapiens
gttcatgcttttaggcctttggggg

SEQ ID NO: 10172 - DNA, 25 bp, Homo sapiens
tgtttcctcatagctagttctcaag

SEQ ID NO: 10173 - DNA, 25 bp, Homo sapiens
aagagttaacttgtggtttggctgt

SEQ ID NO: 10174 - DNA, 25 bp, Homo sapiens
atctaaatcttagtttcctggaata

SEQ ID NO: 10175 - DNA, 25 bp, Homo sapiens
atgaccaccattctaaaccattttt

SEQ ID NO: 10176 - DNA, 25 bp, Homo sapiens
caaattgaccacagacctctaacct

SEQ ID NO: 10177 - DNA, 25 bp, Homo sapiens
cagtggtctggatacgaagtttaca

SEQ ID NO: 10178 - DNA, 25 bp, Homo sapiens
ctgttgggtgcatcagtgcttttca

SEQ ID NO: 10179 - DNA, 25 bp, Homo sapiens
gatggtaaactttgtgttgctcttt

SEQ ID NO: 10180 - DNA, 25 bp, Homo sapiens
ggggctgcttactatagggttaact

SEQ ID NO: 10181 - DNA, 25 bp, Homo sapiens
ggtttggctgtttcctggattttat

SEQ ID NO: 10182 - DNA, 25 bp, Homo sapiens
gtgcttttcaaaggggctgcttact

SEQ ID NO: 10183 - DNA, 25 bp, Homo sapiens
gtttacagtttcataccaactatct

SEQ ID NO: 10184 - DNA, 25 bp, Homo sapiens
aagggcttcctgtagttctattcaa

SEQ ID NO: 10185 - DNA, 25 bp, Homo sapiens
aatgcctaaaaatgcctatttggga

SEQ ID NO: 10186 - DNA, 25 bp, Homo sapiens
agaagctctcttctgtgtagaacag

SEQ ID NO: 10187 - DNA, 25 bp, Homo sapiens
cagttgttccaaaatagcttagtgt

SEQ ID NO: 10188 - DNA, 25 bp, Homo sapiens
gacagatttaactattctttccagc

SEQ ID NO: 10189 - DNA, 25 bp, Homo sapiens
gaggcagtgtctaaagcctaatttt

SEQ ID NO: 10190 - DNA, 25 bp, Homo sapiens
gaggtgctgtcagagtccagtgttc

SEQ ID NO: 10191 - DNA, 25 bp, Homo sapiens
gtagctattaccaggaatttttgaa

SEQ ID NO: 10192 - DNA, 25 bp, Homo sapiens
gtccagtgttctagaagaggcagtg

SEQ ID NO: 10193 - DNA, 25 bp, Homo sapiens
tattctttccagcagtggaggtgct

SEQ ID NO: 10194 - DNA, 25 bp, Homo sapiens
tgttttgttttcctgttgcatgaca

SEQ ID NO: 10195 - DNA, 25 bp, Homo sapiens
aaatgaccctcaaataagccagatg

SEQ ID NO: 10196 - DNA, 25 bp, Homo sapiens
ctgacagtggtgagcatccttttta

SEQ ID NO: 10197 - DNA, 25 bp, Homo sapiens
ctttagtaaactcaccttgcatggt

SEQ ID NO: 10198 - DNA, 25 bp, Homo sapiens
gaaatatcactgacactccagacta

SEQ ID NO: 10199 - DNA, 25 bp, Homo sapiens
gagaaccgttttaatctggattttg

SEQ ID NO: 10200 - DNA, 25 bp, Homo sapiens
gagatctggtggctatttccacatt

SEQ ID NO: 10201 - DNA, 25 bp, Homo sapiens
gagtctaggtttctgcaattttgtt

SEQ ID NO: 10202 - DNA, 25 bp, Homo sapiens
gattgcctgataaccagtttcaatg

SEQ ID NO: 10203 - DNA, 25 bp, Homo sapiens
ggattttgttttgtcacacctggaa

SEQ ID NO: 10204 - DNA, 25 bp, Homo sapiens
ggttcactaccaaatgaccctcaaa

SEQ ID NO: 10205 - DNA, 25 bp, Homo sapiens
ttttatgatcacatggttcactacc

SEQ ID NO: 10206 - DNA, 25 bp, Homo sapiens
actctgatgcagggcgtctgttgct

SEQ ID NO: 10207 - DNA, 25 bp, Homo sapiens
agagcagctcctttggactattcct

SEQ ID NO: 10208 - DNA, 25 bp, Homo sapiens
aggagtgccttcatacactgtaccc

SEQ ID NO: 10209 - DNA, 25 bp, Homo sapiens
gacaaaatgcaaacctatttccctt

SEQ ID NO: 10210 - DNA, 25 bp, Homo sapiens
gaggccttattgccaggagggaggg

SEQ ID NO: 10211 - DNA, 25 bp, Homo sapiens
gcacactgaactgtttggtggcccc

SEQ ID NO: 10212 - DNA, 25 bp, Homo sapiens
ggcttggcccagaattagagttatt

SEQ ID NO: 10213 - DNA, 25 bp, Homo sapiens
tcccttgcctcataggcttctggga

SEQ ID NO: 10214 - DNA, 25 bp, Homo sapiens
tgacatctggggctttgaccctttc

SEQ ID NO: 10215 - DNA, 25 bp, Homo sapiens
ttagggtgatacttttgccctcctt

SEQ ID NO: 10216 - DNA, 25 bp, Homo sapiens
ttttggttgctggcgcttgtgtata

SEQ ID NO: 10217 - DNA, 25 bp, Homo sapiens
agggagccaggcagctgtgtacagt

SEQ ID NO: 10218 - DNA, 25 bp, Homo sapiens
ccagtacatcctcacactgtcagag

SEQ ID NO: 10219 - DNA, 25 bp, Homo sapiens
gaagtggtgaccagacactgcccac

SEQ ID NO: 10220 - DNA, 25 bp, Homo sapiens
gaccaactccaaggtcagctggcca

SEQ ID NO: 10221 - DNA, 25 bp, Homo sapiens
gagaggacaggcctggcaggggccc

SEQ ID NO: 10222 - DNA, 25 bp, Homo sapiens
gcacttcactcccaaggactggagc

SEQ ID NO: 10223 - DNA, 25 bp, Homo sapiens
gccatgagcgggccatgctcaagcg

SEQ ID NO: 10224 - DNA, 25 bp, Homo sapiens
ggctgcaaaaatttctggcttctct

SEQ ID NO: 10225 - DNA, 25 bp, Homo sapiens
tacctcaatctcatcaactactaca

SEQ ID NO: 10226 - DNA, 25 bp, Homo sapiens
tgcccactgcagtgccaagacggca

SEQ ID NO: 10227 - DNA, 25 bp, Homo sapiens
tgcggatcgactccaagtgtctgca

SEQ ID NO: 10228 - DNA, 25 bp, Homo sapiens
aggcttgtactatggccatgacagt

SEQ ID NO: 10229 - DNA, 25 bp, Homo sapiens
agttcatctcactggagcacagcca

SEQ ID NO: 10230 - DNA, 25 bp, Homo sapiens
atgatccctctccaaagtggttgtc

SEQ ID NO: 10231 - DNA, 25 bp, Homo sapiens
cttagctgactttggctttcacatt

SEQ ID NO: 10232 - DNA, 25 bp, Homo sapiens
gaagagatcttgattcctttgggaa

SEQ ID NO: 10233 - DNA, 25 bp, Homo sapiens
gaataacgcaggtcccttttcttgg

SEQ ID NO: 10234 - DNA, 25 bp, Homo sapiens
gccgtctcaaagtttcttagctgac

SEQ ID NO: 10235 - DNA, 25 bp, Homo sapiens
ggaatgccttctcctaagagtcagt

SEQ ID NO: 10236 - DNA, 25 bp, Homo sapiens
ggtccctttatgagttattccttct

SEQ ID NO: 10237 - DNA, 25 bp, Homo sapiens
ggttagggaatggtcacttctgatt

SEQ ID NO: 10238 - DNA, 25 bp, Homo sapiens
tggtttgtgggacaggggcagcttg

SEQ ID NO: 10239 - DNA, 25 bp, Homo sapiens
agcagaaatcggttgctgttttgct

SEQ ID NO: 10240 - DNA, 25 bp, Homo sapiens
gaaacacacctacatgaaaagcaga

SEQ ID NO: 10241 - DNA, 25 bp, Homo sapiens
gatgctgatgctgttaaccaaaggg

SEQ ID NO: 10242 - DNA, 25 bp, Homo sapiens
gcaaaatgccaaaaggggtcttaat

SEQ ID NO: 10243 - DNA, 25 bp, Homo sapiens
gcaaacagctgtatagttgtagaat

SEQ ID NO: 10244 - DNA, 25 bp, Homo sapiens
ggaagcaaatgctacatatatgcaa

SEQ ID NO: 10245 - DNA, 25 bp, Homo sapiens
ggcttcaaaatgtttatacgtggaa

SEQ ID NO: 10246 - DNA, 25 bp, Homo sapiens
gtattgtggtcatttcctatgcaaa

SEQ ID NO: 10247 - DNA, 25 bp, Homo sapiens
gttaatctattaatactgactcagt

SEQ ID NO: 10248 - DNA, 25 bp, Homo sapiens
tatacgtggaaacacacctacatga

SEQ ID NO: 10249 - DNA, 25 bp, Homo sapiens
ttacagtgcagtttagttaatctat

SEQ ID NO: 10250 - DNA, 25 bp, Homo sapiens
agagaaactcacccatgttttcacc

SEQ ID NO: 10251 - DNA, 25 bp, Homo sapiens
agtccacctttactacatatatttc

SEQ ID NO: 10252 - DNA, 25 bp, Homo sapiens
catcttgatctgtgcactagtctgt

SEQ ID NO: 10253 - DNA, 25 bp, Homo sapiens
cccatgttttcaccatccaaagagt

SEQ ID NO: 10254 - DNA, 25 bp, Homo sapiens
gaaatagttgtgtggttgttgtggg

SEQ ID NO: 10255 - DNA, 25 bp, Homo sapiens
ggttgtggtcattctatctgtaata

SEQ ID NO: 10256 - DNA, 25 bp, Homo sapiens
tcccaacacccaacaacaattaact

SEQ ID NO: 10257 - DNA, 25 bp, Homo sapiens
tctagtgttttggtagtccaccttt

SEQ ID NO: 10258 - DNA, 25 bp, Homo sapiens
tctgtgcacaggtttttggtttgtt

SEQ ID NO: 10259 - DNA, 25 bp, Homo sapiens
tgaaaggtcatcattctagtgtttt

SEQ ID NO: 10260 - DNA, 25 bp, Homo sapiens
tgtttcggtttccttgaaaggtcat

SEQ ID NO: 10261 - DNA, 25 bp, Homo sapiens
aaggctttacaatatacggattggc

SEQ ID NO: 10262 - DNA, 25 bp, Homo sapiens
aagtactttagcttctttctgcagc

SEQ ID NO: 10263 - DNA, 25 bp, Homo sapiens
atacggattggctttttgtgaccca

SEQ ID NO: 10264 - DNA, 25 bp, Homo sapiens
ccaacactttggaacctaatactgt

SEQ ID NO: 10265 - DNA, 25 bp, Homo sapiens
gaacctaatactgtgtaaggcttta

SEQ ID NO: 10266 - DNA, 25 bp, Homo sapiens
gaagtggttctcatgcaaaaatatt

SEQ ID NO: 10267 - DNA, 25 bp, Homo sapiens
gataagtactttagcttctttctgc

SEQ ID NO: 10268 - DNA, 25 bp, Homo sapiens
gattgattggttgccacatgttatg

SEQ ID NO: 10269 - DNA, 25 bp, Homo sapiens
ggttgccacatgttatgtttgttga

SEQ ID NO: 10270 - DNA, 25 bp, Homo sapiens
gtgacccagattgattggttgccac

SEQ ID NO: 10271 - DNA, 25 bp, Homo sapiens
tgtttgttgaagtggttctcatgca

SEQ ID NO: 10272 - DNA, 25 bp, Homo sapiens
agacaacctgacactgtggacggcc

SEQ ID NO: 10273 - DNA, 25 bp, Homo sapiens
cactcttcttgcagctgttgagcgc

SEQ ID NO: 10274 - DNA, 25 bp, Homo sapiens
ccaccctgccgagaggactagtatg

SEQ ID NO: 10275 - DNA, 25 bp, Homo sapiens
cctgctgcctctgatcgtaggaatt

SEQ ID NO: 10276 - DNA, 25 bp, Homo sapiens
cgccttgtggctgagaactggacag

SEQ ID NO: 10277 - DNA, 25 bp, Homo sapiens
ggctccgtggagagggactggcaga

SEQ ID NO: 10278 - DNA, 25 bp, Homo sapiens
gtctgctgggtgtgaccatgtttcc

SEQ ID NO: 10279 - DNA, 25 bp, Homo sapiens
taggaattgaggagtgtcccgcctt

SEQ ID NO: 10280 - DNA, 25 bp, Homo sapiens
tcttgcagctgttgagcgcacctaa

SEQ ID NO: 10281 - DNA, 25 bp, Homo sapiens
tcttgctccaaagggctccgtggag

SEQ ID NO: 10282 - DNA, 25 bp, Homo sapiens
tgtttcctctcaataaagttcccct

SEQ ID NO: 10283 - DNA, 25 bp, Homo sapiens
aatgctttccatctccaggagactt

SEQ ID NO: 10284 - DNA, 25 bp, Homo sapiens
accacccctggtgtgtgtagctagt

SEQ ID NO: 10285 - DNA, 25 bp, Homo sapiens
agacatggagttggagctgctgcgg

SEQ ID NO: 10286 - DNA, 25 bp, Homo sapiens
cgctcagcggacctgacaggactgg

SEQ ID NO: 10287 - DNA, 25 bp, Homo sapiens
gaagcgtgtggagcagatccgtgac

SEQ ID NO: 10288 - DNA, 25 bp, Homo sapiens
gaccggttgggtcagagttccatgc

SEQ ID NO: 10289 - DNA, 25 bp, Homo sapiens
gatccgtgaccacatcaatgggcgc

SEQ ID NO: 10290 - DNA, 25 bp, Homo sapiens
gcaagtgatgctacacgttccagcc

SEQ ID NO: 10291 - DNA, 25 bp, Homo sapiens
ggtgcccggatccagagtgtgaaga

SEQ ID NO: 10292 - DNA, 25 bp, Homo sapiens
gtaagattaccctgagctgcagctg

SEQ ID NO: 10293 - DNA, 25 bp, Homo sapiens
gtagcccaaagtacagcctggacca

SEQ ID NO: 10294 - DNA, 25 bp, Homo sapiens
aaaagatgccctttcttgaattgca

SEQ ID NO: 10295 - DNA, 25 bp, Homo sapiens
aataccggatcccagctgatgtaga

SEQ ID NO: 10296 - DNA, 25 bp, Homo sapiens
accattcccatcacccgtgaaaaga

SEQ ID NO: 10297 - DNA, 25 bp, Homo sapiens
agagcacctgttggagtctgatctt

SEQ ID NO: 10298 - DNA, 25 bp, Homo sapiens
atccctgtcatctgatggggtcctc

SEQ ID NO: 10299 - DNA, 25 bp, Homo sapiens
gaaagtttccccaccagtgaatgaa

SEQ ID NO: 10300 - DNA, 25 bp, Homo sapiens
gaccagttcttcggagagcacctgt

SEQ ID NO: 10301 - DNA, 25 bp, Homo sapiens
gctggtttgacactggactctcaga

SEQ ID NO: 10302 - DNA, 25 bp, Homo sapiens
ggacaggttctctgtcaacctggat

SEQ ID NO: 10303 - DNA, 25 bp, Homo sapiens
ggcacccagctggtttgacactgga

SEQ ID NO: 10304 - DNA, 25 bp, Homo sapiens
gttccacaggaaataccggatccca

SEQ ID NO: 10305 - DNA, 25 bp, Homo sapiens
aaaaaatgttctctgcttgctacca

SEQ ID NO: 10306 - DNA, 25 bp, Homo sapiens
aaaaaattgcttattactcttcatt

SEQ ID NO: 10307 - DNA, 25 bp, Homo sapiens
gaaatgcttggatccttaaggagtt

SEQ ID NO: 10308 - DNA, 25 bp, Homo sapiens
gatgaccgcatctagattatttttt

SEQ ID NO: 10309 - DNA, 25 bp, Homo sapiens
gattttcactatagctatgttacgc

SEQ ID NO: 10310 - DNA, 25 bp, Homo sapiens
gctactgtccaatctcttgtgatgt

SEQ ID NO: 10311 - DNA, 25 bp, Homo sapiens
ggagtttacgaaatctgctgtttta

SEQ ID NO: 10312 - DNA, 25 bp, Homo sapiens
ggcataatggcaaatccttcaagca

SEQ ID NO: 10313 - DNA, 25 bp, Homo sapiens
gtcactaagtttcatgtctgtacag

SEQ ID NO: 10314 - DNA, 25 bp, Homo sapiens
gttacgctaagctactgtccaatct

SEQ ID NO: 10315 - DNA, 25 bp, Homo sapiens
gttctctgcttgctaccaaaggaca

SEQ ID NO: 10316 - DNA, 25 bp, Homo sapiens
aagaatgctacaaaatcctgacatc

SEQ ID NO: 10317 - DNA, 25 bp, Homo sapiens
atgttggctatgtcctaaccaggca

SEQ ID NO: 10318 - DNA, 25 bp, Homo sapiens
catttcaaagagttggcattttccc

SEQ ID NO: 10319 - DNA, 25 bp, Homo sapiens
ggtagttctaattattcagctactt

SEQ ID NO: 10320 - DNA, 25 bp, Homo sapiens
gtacaagatactacattccattgaa

SEQ ID NO: 10321 - DNA, 25 bp, Homo sapiens
gtagacttttcattgtataggcaca

SEQ ID NO: 10322 - DNA, 25 bp, Homo sapiens
gtcctaaccaggcaaccagataaca

SEQ ID NO: 10323 - DNA, 25 bp, Homo sapiens
gtgctacagatactacatttcaaag

SEQ ID NO: 10324 - DNA, 25 bp, Homo sapiens
taaaatttcgagcccacaaatctat

SEQ ID NO: 10325 - DNA, 25 bp, Homo sapiens
taggcacaaccaaagagtcagactg

SEQ ID NO: 10326 - DNA, 25 bp, Homo sapiens
ttgagtcttttatctaggtagttct

SEQ ID NO: 10327 - DNA, 25 bp, Homo sapiens
agtaccttgactttgttcacagcat

SEQ ID NO: 10328 - DNA, 25 bp, Homo sapiens
catgcttgacacaactgctgtggct

SEQ ID NO: 10329 - DNA, 25 bp, Homo sapiens
cctggttgctttgtgtctagttttc

SEQ ID NO: 10330 - DNA, 25 bp, Homo sapiens
gactagaccaattgtcatgcttgac

SEQ ID NO: 10331 - DNA, 25 bp, Homo sapiens
ggtagtagtttttctgtaacacaga

SEQ ID NO: 10332 - DNA, 25 bp, Homo sapiens
gtctagttttctagacccttcatct

SEQ ID NO: 10333 - DNA, 25 bp, Homo sapiens
gtggctggttggtgctttgtttatg

SEQ ID NO: 10334 - DNA, 25 bp, Homo sapiens
tagctaagcacagatctaccttggt

SEQ ID NO: 10335 - DNA, 25 bp, Homo sapiens
tctaccttggtgatttggaccctgg

SEQ ID NO: 10336 - DNA, 25 bp, Homo sapiens
tgaatcttcgggtgtttccctttag

SEQ ID NO: 10337 - DNA, 25 bp, Homo sapiens
tgagcactcacaattgttgactaaa

SEQ ID NO: 10338 - DNA, 25 bp, Homo sapiens
aaaaaatcatctcaccttgagccca

SEQ ID NO: 10339 - DNA, 25 bp, Homo sapiens
aatatcctggaccggcaagatcctc

SEQ ID NO: 10340 - DNA, 25 bp, Homo sapiens
aatggaaatggcacttaccagtcct

SEQ ID NO: 10341 - DNA, 25 bp, Homo sapiens
acagcaaaaatatcctggaccggca

SEQ ID NO: 10342 - DNA, 25 bp, Homo sapiens
accacagaaatcacagtcaatggat

SEQ ID NO: 10343 - DNA, 25 bp, Homo sapiens
cagctaggaagcaagggttggaggc

SEQ ID NO: 10344 - DNA, 25 bp, Homo sapiens
gcctgtcttgagtagacttggaccc

SEQ ID NO: 10345 - DNA, 25 bp, Homo sapiens
gtcttgagtagacttggacccaaaa

SEQ ID NO: 10346 - DNA, 25 bp, Homo sapiens
tgagtagacttggacccaaaaaatc

SEQ ID NO: 10347 - DNA, 25 bp, Homo sapiens
tgcggaaatacctgaaatacagcaa

SEQ ID NO: 10348 - DNA, 25 bp, Homo sapiens
tggaaatggcacttaccagtcctgg

SEQ ID NO: 10349 - DNA, 25 bp, Homo sapiens
aatcatttgaaactccaagggccaa

SEQ ID NO: 10350 - DNA, 25 bp, Homo sapiens
acaagacccacgtggagaaggactt

SEQ ID NO: 10351 - DNA, 25 bp, Homo sapiens
accgtggggaactgtgggtcagaga

SEQ ID NO: 10352 - DNA, 25 bp, Homo sapiens
agcacaatgggctctatcttcatca

SEQ ID NO: 10353 - DNA, 25 bp, Homo sapiens
attcttggtgctgccacctagagga

SEQ ID NO: 10354 - DNA, 25 bp, Homo sapiens
gaatctgcggaactgtgcatgatga

SEQ ID NO: 10355 - DNA, 25 bp, Homo sapiens
gatgagaaaaaaccagatgtgctgc

SEQ ID NO: 10356 - DNA, 25 bp, Homo sapiens
gcaaaccgtggggaactgtgggtca

SEQ ID NO: 10357 - DNA, 25 bp, Homo sapiens
gtcctggagagacagcacaatgggc

SEQ ID NO: 10358 - DNA, 25 bp, Homo sapiens
tgagaacctggaggaagatgctgtt

SEQ ID NO: 10359 - DNA, 25 bp, Homo sapiens
ttggtgctgccacctagaggaagta

SEQ ID NO: 10360 - DNA, 25 bp, Homo sapiens
aaaggacagaggtctgctccttcct

SEQ ID NO: 10361 - DNA, 25 bp, Homo sapiens
aatggaggctgggtggaccactgcc

SEQ ID NO: 10362 - DNA, 25 bp, Homo sapiens
agatccagggcctttcaaacatccc

SEQ ID NO: 10363 - DNA, 25 bp, Homo sapiens
cccgtccactcttcaacaggaggaa

SEQ ID NO: 10364 - DNA, 25 bp, Homo sapiens
cttatcccccatacttgtgagttat

SEQ ID NO: 10365 - DNA, 25 bp, Homo sapiens
gtcatggccatactcaccattagcc

SEQ ID NO: 10366 - DNA, 25 bp, Homo sapiens
tccagctgtagatgttcttatcccc

SEQ ID NO: 10367 - DNA, 25 bp, Homo sapiens
tgacgttcccaagtgacagatccag

SEQ ID NO: 10368 - DNA, 25 bp, Homo sapiens
tgttcactctgactctgtgcaaatt

SEQ ID NO: 10369 - DNA, 25 bp, Homo sapiens
ttacagtagaccgctgacgttccca

SEQ ID NO: 10370 - DNA, 25 bp, Homo sapiens
tttccccactcttaaatactgtact

SEQ ID NO: 10371 - DNA, 25 bp, Homo sapiens
aagccctaaggtcctaaggcatcta

SEQ ID NO: 10372 - DNA, 25 bp, Homo sapiens
ccgggtcttgattcagtcacatggc

SEQ ID NO: 10373 - DNA, 25 bp, Homo sapiens
gaacccgtgactgttactttataca

SEQ ID NO: 10374 - DNA, 25 bp, Homo sapiens
gaatgcaaccaagtcacacgctttt

SEQ ID NO: 10375 - DNA, 25 bp, Homo sapiens
gacaggtcctgatttctagaacccg

SEQ ID NO: 10376 - DNA, 25 bp, Homo sapiens
gagttttgtcattcagagtcagcca

SEQ ID NO: 10377 - DNA, 25 bp, Homo sapiens
ggggggtcctaaatgtaatcacgag

SEQ ID NO: 10378 - DNA, 25 bp, Homo sapiens
gtttgcctagacagcttttctcaac

SEQ ID NO: 10379 - DNA, 25 bp, Homo sapiens
tcagccaggaccataccgggtcttg

SEQ ID NO: 10380 - DNA, 25 bp, Homo sapiens
tgacatcttgaatccttccattcca

SEQ ID NO: 10381 - DNA, 25 bp, Homo sapiens
tggcccccaaagatagacaggtcct

SEQ ID NO: 10382 - DNA, 25 bp, Homo sapiens
aaggtcatggatgtgcacgatggca

SEQ ID NO: 10383 - DNA, 25 bp, Homo sapiens
aatccgcaccaaggtcatggatgtg

SEQ ID NO: 10384 - DNA, 25 bp, Homo sapiens
cccgtgtggacacagatcccactgg

SEQ ID NO: 10385 - DNA, 25 bp, Homo sapiens
cctggcaatcaatacagcttcatta

SEQ ID NO: 10386 - DNA, 25 bp, Homo sapiens
cgccaaatccgcaccaaggtcatgg

SEQ ID NO: 10387 - DNA, 25 bp, Homo sapiens
gcagtcatccagagatgtgacctcc

SEQ ID NO: 10388 - DNA, 25 bp, Homo sapiens
ggacacagatcccactggaagatcc

SEQ ID NO: 10389 - DNA, 25 bp, Homo sapiens
ggatcgcagtcatccagagatgtga

SEQ ID NO: 10390 - DNA, 25 bp, Homo sapiens
ggtccttcgcaccaagaactgaggc

SEQ ID NO: 10391 - DNA, 25 bp, Homo sapiens
tgcacgatggcaaggtggtgtccac

SEQ ID NO: 10392 - DNA, 25 bp, Homo sapiens
ttcgcaccaagaactgaggctgccc

SEQ ID NO: 10393 - DNA, 25 bp, Homo sapiens
aaaagaggatccgtgctgtctcctt

SEQ ID NO: 10394 - DNA, 25 bp, Homo sapiens
aacgcagatgcggcaaagctccagc

SEQ ID NO: 10395 - DNA, 25 bp, Homo sapiens
ccttccggtgcgtgtgaagccacgg

SEQ ID NO: 10396 - DNA, 25 bp, Homo sapiens
gaacttgggcaggggaagctccgcc

SEQ ID NO: 10397 - DNA, 25 bp, Homo sapiens
gagccaggtttaaccgttgcgtcac

SEQ ID NO: 10398 - DNA, 25 bp, Homo sapiens
gccgcgagctccggaggatgagtga

SEQ ID NO: 10399 - DNA, 25 bp, Homo sapiens
tacttccctcaggcctatgcaaaaa

SEQ ID NO: 10400 - DNA, 25 bp, Homo sapiens
tccagctggacgcgagtcttccagt

SEQ ID NO: 10401 - DNA, 25 bp, Homo sapiens
tgccctgggcagccatcttgaatat

SEQ ID NO: 10402 - DNA, 25 bp, Homo sapiens
tggagggagggctgacccagattcc

SEQ ID NO: 10403 - DNA, 25 bp, Homo sapiens
ttcctcgcccgaagagcgcgggcac

SEQ ID NO: 10404 - DNA, 25 bp, Homo sapiens
cagaggtcctctaaactggtaccga

SEQ ID NO: 10405 - DNA, 25 bp, Homo sapiens
cggagaaggacttcgtgctcgttcc

SEQ ID NO: 10406 - DNA, 25 bp, Homo sapiens
gaacagaacctgagtcgtcggactt

SEQ ID NO: 10407 - DNA, 25 bp, Homo sapiens
gaggaaatccagttctatgtgcagc

SEQ ID NO: 10408 - DNA, 25 bp, Homo sapiens
gcacatggaggactggattccccac

SEQ ID NO: 10409 - DNA, 25 bp, Homo sapiens
gccctgatggtcacggcggagaagg

SEQ ID NO: 10410 - DNA, 25 bp, Homo sapiens
ggaacccaccggtggtctcaaagat

SEQ ID NO: 10411 - DNA, 25 bp, Homo sapiens
ggacggaagatcctgattccggccc

SEQ ID NO: 10412 - DNA, 25 bp, Homo sapiens
ggactttcaaaagcctcttcagagc

SEQ ID NO: 10413 - DNA, 25 bp, Homo sapiens
gtagaacgcagcgtgtgcccacgct

SEQ ID NO: 10414 - DNA, 25 bp, Homo sapiens
tggctggattctgatgcccggaacc

SEQ ID NO: 10415 - DNA, 25 bp, Homo sapiens
aagatagggcttttgctcccttgtt

SEQ ID NO: 10416 - DNA, 25 bp, Homo sapiens
agggaccattattacatctctgaac

SEQ ID NO: 10417 - DNA, 25 bp, Homo sapiens
atcaaggacaagccaccctagtgtc

SEQ ID NO: 10418 - DNA, 25 bp, Homo sapiens
atctctgaactacctttgtatccaa

SEQ ID NO: 10419 - DNA, 25 bp, Homo sapiens
ccaccctagtgtctcatgtttgtat

SEQ ID NO: 10420 - DNA, 25 bp, Homo sapiens
ccttaaatgaattgctttctcccaa

SEQ ID NO: 10421 - DNA, 25 bp, Homo sapiens
ctctcagcccatgataaagttcctt

SEQ ID NO: 10422 - DNA, 25 bp, Homo sapiens
gaagcacccacttttgcaatgttgt

SEQ ID NO: 10423 - DNA, 25 bp, Homo sapiens
gcaatgttgttctaagctatctatc

SEQ ID NO: 10424 - DNA, 25 bp, Homo sapiens
gctcccttgttcttggagggaccat

SEQ ID NO: 10425 - DNA, 25 bp, Homo sapiens
ttcttttttatattgtcctccacct

SEQ ID NO: 10426 - DNA, 25 bp, Homo sapiens
aaggaggtatgaatcccagtcccca

SEQ ID NO: 10427 - DNA, 25 bp, Homo sapiens
aataggtctcctaggtgcctgaagc

SEQ ID NO: 10428 - DNA, 25 bp, Homo sapiens
agaaagcgaaggtcgacccagggct

SEQ ID NO: 10429 - DNA, 25 bp, Homo sapiens
ccaggccaacattggtgtccctgtc

SEQ ID NO: 10430 - DNA, 25 bp, Homo sapiens
cctgggtaccctggtggggatgcag

SEQ ID NO: 10431 - DNA, 25 bp, Homo sapiens
gagtgaccacgggattccctgagaa

SEQ ID NO: 10432 - DNA, 25 bp, Homo sapiens
ggaacctagctctttaaactctggg

SEQ ID NO: 10433 - DNA, 25 bp, Homo sapiens
ggcagcccagagaactctcctggga

SEQ ID NO: 10434 - DNA, 25 bp, Homo sapiens
ggctgtgggtgagccaggccaacat

SEQ ID NO: 10435 - DNA, 25 bp, Homo sapiens
gtttcctgtcactcagagctgattc

SEQ ID NO: 10436 - DNA, 25 bp, Homo sapiens
tgaagcgctgagcaacctgggtacc

SEQ ID NO: 10437 - DNA, 25 bp, Homo sapiens
aaccctgtgtgcctgtcagtatgaa

SEQ ID NO: 10438 - DNA, 25 bp, Homo sapiens
agaagagactaaaccctgtgtgcct

SEQ ID NO: 10439 - DNA, 25 bp, Homo sapiens
agcatcaccactagcagcatatcag

SEQ ID NO: 10440 - DNA, 25 bp, Homo sapiens
caaaatcttactttccagaatccca

SEQ ID NO: 10441 - DNA, 25 bp, Homo sapiens
gaagaggggtccagtgggtctgagc

SEQ ID NO: 10442 - DNA, 25 bp, Homo sapiens
gaagccatacagaaatcactccaga

SEQ ID NO: 10443 - DNA, 25 bp, Homo sapiens
gaagtgtgtgtgtgttcgctgcttc

SEQ ID NO: 10444 - DNA, 25 bp, Homo sapiens
gagccactcgtaacagcgaacggtc

SEQ ID NO: 10445 - DNA, 25 bp, Homo sapiens
gattccattacctcatatctcaaag

SEQ ID NO: 10446 - DNA, 25 bp, Homo sapiens
gcaagccaaggcttagcctccatga

SEQ ID NO: 10447 - DNA, 25 bp, Homo sapiens
ggacttctccagcagatggcaagcc

SEQ ID NO: 10448 - DNA, 25 bp, Homo sapiens
aactgcagcggcacggctatgagaa

SEQ ID NO: 10449 - DNA, 25 bp, Homo sapiens
agtgatcatttcacacccttttgtg

SEQ ID NO: 10450 - DNA, 25 bp, Homo sapiens
atggctctttaaggtgaccgccacc

SEQ ID NO: 10451 - DNA, 25 bp, Homo sapiens
ctacggggctatcagccatggcgtg

SEQ ID NO: 10452 - DNA, 25 bp, Homo sapiens
gggtctgctgatcatgggagcgggc

SEQ ID NO: 10453 - DNA, 25 bp, Homo sapiens
gggtgtcccgtgaggctgtatcggg

SEQ ID NO: 10454 - DNA, 25 bp, Homo sapiens
gtcctagtgtctattccctggaatt

SEQ ID NO: 10455 - DNA, 25 bp, Homo sapiens
taagaattcccagatagtcccagca

SEQ ID NO: 10456 - DNA, 25 bp, Homo sapiens
taccgcttcctggaggaacgaccct

SEQ ID NO: 10457 - DNA, 25 bp, Homo sapiens
tcatgtttccctactaacatcccaa

SEQ ID NO: 10458 - DNA, 25 bp, Homo sapiens
tgcgcaggaagaagccctacggggc

SEQ ID NO: 10459 - DNA, 25 bp, Homo sapiens
aactggaagtctgaagcgagccctg

SEQ ID NO: 10460 - DNA, 25 bp, Homo sapiens
aatttgcagctgccttcttggcatt

SEQ ID NO: 10461 - DNA, 25 bp, Homo sapiens
accaagcccaaacctcaagcagaat

SEQ ID NO: 10462 - DNA, 25 bp, Homo sapiens
catctccaagccctgtggcaaactg

SEQ ID NO: 10463 - DNA, 25 bp, Homo sapiens
ccctgcacaatgccgaatgccagaa

SEQ ID NO: 10464 - DNA, 25 bp, Homo sapiens
gagtgcaaataccagttccaggcct

SEQ ID NO: 10465 - DNA, 25 bp, Homo sapiens
gatgtaagatcccctgcaactggaa

SEQ ID NO: 10466 - DNA, 25 bp, Homo sapiens
ggcattcattttcatactggcagct

SEQ ID NO: 10467 - DNA, 25 bp, Homo sapiens
tgacctgaacacagccctgaagacc

SEQ ID NO: 10468 - DNA, 25 bp, Homo sapiens
tgccagaagactgtcaccatctcca

SEQ ID NO: 10469 - DNA, 25 bp, Homo sapiens
tgtgtgtgtgcccaccagtggagac

SEQ ID NO: 10470 - DNA, 25 bp, Homo sapiens
cagcttgatggtggcgtttttgaaa

SEQ ID NO: 10471 - DNA, 25 bp, Homo sapiens
gactagtcatgcatcatcagtaatt

SEQ ID NO: 10472 - DNA, 25 bp, Homo sapiens
gattatcttactggttcaacatttt

SEQ ID NO: 10473 - DNA, 25 bp, Homo sapiens
gattatgcattccgtagtattattt

SEQ ID NO: 10474 - DNA, 25 bp, Homo sapiens
gggtactactagggatatctgtggc

SEQ ID NO: 10475 - DNA, 25 bp, Homo sapiens
gttccgtgtcttaacagtttgtgat

SEQ ID NO: 10476 - DNA, 25 bp, Homo sapiens
gttgacacttttggcttttatttct

SEQ ID NO: 10477 - DNA, 25 bp, Homo sapiens
taatttggggttcattttgcttcct

SEQ ID NO: 10478 - DNA, 25 bp, Homo sapiens
tatagtatttcagttccgtgtctta

SEQ ID NO: 10479 - DNA, 25 bp, Homo sapiens
tgcttccttttctttatgcttagat

SEQ ID NO: 10480 - DNA, 25 bp, Homo sapiens
ttcacagagtgctttgtagcaggca

SEQ ID NO: 10481 - DNA, 25 bp, Homo sapiens
aagttttaatggattgcacctctgt

SEQ ID NO: 10482 - DNA, 25 bp, Homo sapiens
agtcattttaaccgaatgttcattc

SEQ ID NO: 10483 - DNA, 25 bp, Homo sapiens
atttgaccattgtgaaatcctttct

SEQ ID NO: 10484 - DNA, 25 bp, Homo sapiens
gaatgctgtaaagtgtcttctaaaa

SEQ ID NO: 10485 - DNA, 25 bp, Homo sapiens
gcagccttccaatctatgttggttt

SEQ ID NO: 10486 - DNA, 25 bp, Homo sapiens
gtattgtgcactgatttgaccattg

SEQ ID NO: 10487 - DNA, 25 bp, Homo sapiens
gtcttctaaaatgatgtagcctgac

SEQ ID NO: 10488 - DNA, 25 bp, Homo sapiens
taatagctttgcttgcagccttcca

SEQ ID NO: 10489 - DNA, 25 bp, Homo sapiens
tacaaataagcacactaacccctcg

SEQ ID NO: 10490 - DNA, 25 bp, Homo sapiens
tgcacctctgtaaactattcctaaa

SEQ ID NO: 10491 - DNA, 25 bp, Homo sapiens
tgttggtttacctgtagtgttttat

SEQ ID NO: 10492 - DNA, 25 bp, Homo sapiens
aggcctagcctcttttaacagcctc

SEQ ID NO: 10493 - DNA, 25 bp, Homo sapiens
ctcacccagtcttctacacagatgg

SEQ ID NO: 10494 - DNA, 25 bp, Homo sapiens
gaagtgggagcaccctacagggaca

SEQ ID NO: 10495 - DNA, 25 bp, Homo sapiens
gacaggcaaatgtacttctcaccca

SEQ ID NO: 10496 - DNA, 25 bp, Homo sapiens
gcttacctgatctcatgttaggcct

SEQ ID NO: 10497 - DNA, 25 bp, Homo sapiens
ggacactatcactcatgctggtggc

SEQ ID NO: 10498 - DNA, 25 bp, Homo sapiens
ggagttctctatactcaggtacctc

SEQ ID NO: 10499 - DNA, 25 bp, Homo sapiens
taggcctaagaggctttctccagga

SEQ ID NO: 10500 - DNA, 25 bp, Homo sapiens
tgacacggactgtgcatactttccc

SEQ ID NO: 10501 - DNA, 25 bp, Homo sapiens
tttgtcaggaaaccttggcctctgc

SEQ ID NO: 10502 - DNA, 25 bp, Homo sapiens
ttttctaaccctgacacggactgtg

SEQ ID NO: 10503 - DNA, 25 bp, Homo sapiens
aattgagatgcttctggacctgata

SEQ ID NO: 10504 - DNA, 25 bp, Homo sapiens
acgacagcgttcttcagagatgcta

SEQ ID NO: 10505 - DNA, 25 bp, Homo sapiens
agccagctacagatgcatgcatatt

SEQ ID NO: 10506 - DNA, 25 bp, Homo sapiens
agggcaggagaggtttcgtagctta

SEQ ID NO: 10507 - DNA, 25 bp, Homo sapiens
atagtagttcaggtggcccatgcct

SEQ ID NO: 10508 - DNA, 25 bp, Homo sapiens
catgcctgggatcttctctatgatt

SEQ ID NO: 10509 - DNA, 25 bp, Homo sapiens
ccatccccattagacctacgaataa

SEQ ID NO: 10510 - DNA, 25 bp, Homo sapiens
ggagtggtgcgatcaaatggtcatg

SEQ ID NO: 10511 - DNA, 25 bp, Homo sapiens
gtggacaagtcctggattcctgaag

SEQ ID NO: 10512 - DNA, 25 bp, Homo sapiens
gtgtacaaattgcttctcaccatcc

SEQ ID NO: 10513 - DNA, 25 bp, Homo sapiens
tatggaatcccctactttgaaacta

SEQ ID NO: 10514 - DNA, 25 bp, Homo sapiens
aacttccagagatcttaatggctat

SEQ ID NO: 10515 - DNA, 25 bp, Homo sapiens
agagctcatgagcatttactgtact

SEQ ID NO: 10516 - DNA, 25 bp, Homo sapiens
agatgcctgtttgctatttggtgga

SEQ ID NO: 10517 - DNA, 25 bp, Homo sapiens
atcatttattccgctgcattgccaa

SEQ ID NO: 10518 - DNA, 25 bp, Homo sapiens
gatggttacactagaagcccagact

SEQ ID NO: 10519 - DNA, 25 bp, Homo sapiens
gcattgccaaagtgtcttcatacca

SEQ ID NO: 10520 - DNA, 25 bp, Homo sapiens
gccaagatcatttattccgctgcat

SEQ ID NO: 10521 - DNA, 25 bp, Homo sapiens
gcccagactttacgactacacaata

SEQ ID NO: 10522 - DNA, 25 bp, Homo sapiens
gtattctgtagcctatatttttcat

SEQ ID NO: 10523 - DNA, 25 bp, Homo sapiens
tatctaaactgtacttgtaccccct

SEQ ID NO: 10524 - DNA, 25 bp, Homo sapiens
ttactgtacttgctgggtcttgcca

SEQ ID NO: 10525 - DNA, 25 bp, Homo sapiens
agcgatagagggtccctctctgctc

SEQ ID NO: 10526 - DNA, 25 bp, Homo sapiens
cgcccaccagctactgaagggaccc

SEQ ID NO: 10527 - DNA, 25 bp, Homo sapiens
cttcacccagggcagaacaaggcag

SEQ ID NO: 10528 - DNA, 25 bp, Homo sapiens
gcagaatcgcaggaaacccgcttcc

SEQ ID NO: 10529 - DNA, 25 bp, Homo sapiens
gccaagccaaatgtgcttcctgcag

SEQ ID NO: 10530 - DNA, 25 bp, Homo sapiens
gccccagggagcttaaaacagacat

SEQ ID NO: 10531 - DNA, 25 bp, Homo sapiens
gctactgaagggacccaaggcaccc

SEQ ID NO: 10532 - DNA, 25 bp, Homo sapiens
gctggagcgagtccctcagaaattc

SEQ ID NO: 10533 - DNA, 25 bp, Homo sapiens
gctgtgaaggtatagcaccacccca

SEQ ID NO: 10534 - DNA, 25 bp, Homo sapiens
taaaacagacattccacagggcctg

SEQ ID NO: 10535 - DNA, 25 bp, Homo sapiens
tgaagccagcgatagagggtccctc

SEQ ID NO: 10536 - DNA, 25 bp, Homo sapiens
aatctggtgaacgctacgcttacat

SEQ ID NO: 10537 - DNA, 25 bp, Homo sapiens
caagtgcgagacctgggtgtccaac

SEQ ID NO: 10538 - DNA, 25 bp, Homo sapiens
gaggagatctaagcagcgttcccac

SEQ ID NO: 10539 - DNA, 25 bp, Homo sapiens
gagttccgcagagcttactatacgc

SEQ ID NO: 10540 - DNA, 25 bp, Homo sapiens
gtatcgtcttcctcaacaagtgcga

SEQ ID NO: 10541 - DNA, 25 bp, Homo sapiens
gttcgctatctcttgtgtcaaatct

SEQ ID NO: 10542 - DNA, 25 bp, Homo sapiens
tactatacgcggtctgtcctaatct

SEQ ID NO: 10543 - DNA, 25 bp, Homo sapiens
tcgacatgaccaccttcagcaagga

SEQ ID NO: 10544 - DNA, 25 bp, Homo sapiens
tgcaaaaacaatcctctttctctct

SEQ ID NO: 10545 - DNA, 25 bp, Homo sapiens
tgcgctacaaccacatgctgcggaa

SEQ ID NO: 10546 - DNA, 25 bp, Homo sapiens
tgtcctaatctttgtggtgttcgct

SEQ ID NO: 10547 - DNA, 25 bp, Homo sapiens
aaagagctctgacaccacttttcat

SEQ ID NO: 10548 - DNA, 25 bp, Homo sapiens
aggtgtacaagtatgaccgcgcctg

SEQ ID NO: 10549 - DNA, 25 bp, Homo sapiens
ataaaccactacaacctggccaagc

SEQ ID NO: 10550 - DNA, 25 bp, Homo sapiens
attgcttctgtttgctaatgctgct

SEQ ID NO: 10551 - DNA, 25 bp, Homo sapiens
cccagtgcatcccagaaggcttgga

SEQ ID NO: 10552 - DNA, 25 bp, Homo sapiens
cgccctggatgtcagttctgtcaga

SEQ ID NO: 10553 - DNA, 25 bp, Homo sapiens
gatgggttcgtcctcaagaacaccc

SEQ ID NO: 10554 - DNA, 25 bp, Homo sapiens
ggcttggagagctactacgcggagc

SEQ ID NO: 10555 - DNA, 25 bp, Homo sapiens
gggcaagttccttacaatgtgtcac

SEQ ID NO: 10556 - DNA, 25 bp, Homo sapiens
tacgcggagcaagactccagtgccc

SEQ ID NO: 10557 - DNA, 25 bp, Homo sapiens
tcgtcttcctggttgtctacaaggt

SEQ ID NO: 10558 - DNA, 25 bp, Homo sapiens
aggccgagcctgtatttccaggtag

SEQ ID NO: 10559 - DNA, 25 bp, Homo sapiens
cagcggtgtgcatcagaggcgtgtg

SEQ ID NO: 10560 - DNA, 25 bp, Homo sapiens
cgtggactttattgactgtgaattc

SEQ ID NO: 10561 - DNA, 25 bp, Homo sapiens
cttccctgcgcatctgaatagacac

SEQ ID NO: 10562 - DNA, 25 bp, Homo sapiens
gaagggtggtgttaagctgtggaaa

SEQ ID NO: 10563 - DNA, 25 bp, Homo sapiens
gacacaagtgaagcccgtgtgcgca

SEQ ID NO: 10564 - DNA, 25 bp, Homo sapiens
gaggcgtgtgctgagaagggtggtg

SEQ ID NO: 10565 - DNA, 25 bp, Homo sapiens
gtaacttctgacatttcactctgtg

SEQ ID NO: 10566 - DNA, 25 bp, Homo sapiens
gtgtctggagacacagaccgtgacc

SEQ ID NO: 10567 - DNA, 25 bp, Homo sapiens
gtgtgcgcacagtgcagaggccgag

SEQ ID NO: 10568 - DNA, 25 bp, Homo sapiens
taaatcagtgccaaagcttccctgc

SEQ ID NO: 10569 - DNA, 25 bp, Homo sapiens
actcgagtcggatccgtgttggggc

SEQ ID NO: 10570 - DNA, 25 bp, Homo sapiens
caggatcgggcactcagtggagccg

SEQ ID NO: 10571 - DNA, 25 bp, Homo sapiens
ccagcccaggatcgggcactcagtg

SEQ ID NO: 10572 - DNA, 25 bp, Homo sapiens
cccgccgtgcaagagtcgagccggc

SEQ ID NO: 10573 - DNA, 25 bp, Homo sapiens
ccgagagcgccttaactcgagtcgg

SEQ ID NO: 10574 - DNA, 25 bp, Homo sapiens
ccttaactcgagtcggatccgtgtt

SEQ ID NO: 10575 - DNA, 25 bp, Homo sapiens
gccccggagccctatattaaggcca

SEQ ID NO: 10576 - DNA, 25 bp, Homo sapiens
ggagccctatattaaggccacggag

SEQ ID NO: 10577 - DNA, 25 bp, Homo sapiens
ggggaggtccatctcagaacacccc

SEQ ID NO: 10578 - DNA, 25 bp, Homo sapiens
gtgcaagagtcgagccggcagagca

SEQ ID NO: 10579 - DNA, 25 bp, Homo sapiens
ttaaggccacggagcgacagcgggc

SEQ ID NO: 10580 - DNA, 25 bp, Homo sapiens
ataaatttatttactgctagtctta

SEQ ID NO: 10581 - DNA, 25 bp, Homo sapiens
cctttttctaggcctacatgctttg

SEQ ID NO: 10582 - DNA, 25 bp, Homo sapiens
ctgctagtcttaagaactgctttct

SEQ ID NO: 10583 - DNA, 25 bp, Homo sapiens
gagagcctttttctaggcctacatg

SEQ ID NO: 10584 - DNA, 25 bp, Homo sapiens
gagcctttttctaggcctacatgct

SEQ ID NO: 10585 - DNA, 25 bp, Homo sapiens
gatgtagatttatttcatcatatta

SEQ ID NO: 10586 - DNA, 25 bp, Homo sapiens
gctttgtgaacaagtccctgtaatt

SEQ ID NO: 10587 - DNA, 25 bp, Homo sapiens
tacagaccgaactgttgtataaatt

SEQ ID NO: 10588 - DNA, 25 bp, Homo sapiens
tcatcatattatacagaccgaactg

SEQ ID NO: 10589 - DNA, 25 bp, Homo sapiens
tgagggtttcagagagcctttttct

SEQ ID NO: 10590 - DNA, 25 bp, Homo sapiens
ttctaggcctacatgctttgtgaac

SEQ ID NO: 10591 - DNA, 25 bp, Homo sapiens
aaatagcttctaagagtccggcggc

SEQ ID NO: 10592 - DNA, 25 bp, Homo sapiens
agcagtgtatgagctaccagcgtgc

SEQ ID NO: 10593 - DNA, 25 bp, Homo sapiens
atgagctaccagcgtgcatgtcagc

SEQ ID NO: 10594 - DNA, 25 bp, Homo sapiens
ccctgtcgtgttctgtgttagtgat

SEQ ID NO: 10595 - DNA, 25 bp, Homo sapiens
cctgcagcctgtgctgagggtagca

SEQ ID NO: 10596 - DNA, 25 bp, Homo sapiens
gatcactgcctttaatacagtctgt

SEQ ID NO: 10597 - DNA, 25 bp, Homo sapiens
gttggcctaaggtggttgtgctcgg

SEQ ID NO: 10598 - DNA, 25 bp, Homo sapiens
gttgtgctcggagggtttcttgttt

SEQ ID NO: 10599 - DNA, 25 bp, Homo sapiens
tccctgtaattgttgtttgtatgta

SEQ ID NO: 10600 - DNA, 25 bp, Homo sapiens
tctaagagtccggcggcatctgtct

SEQ ID NO: 10601 - DNA, 25 bp, Homo sapiens
ttctctctcaatttttggttgaata

SEQ ID NO: 10602 - DNA, 25 bp, Homo sapiens
agcagtatcatgaagcctaaacgcg

SEQ ID NO: 10603 - DNA, 25 bp, Homo sapiens
aggagctcactgtggtgtctgtgtt

SEQ ID NO: 10604 - DNA, 25 bp, Homo sapiens
ataagccattctgactcatatcccc

SEQ ID NO: 10605 - DNA, 25 bp, Homo sapiens
ctgactcatatcccctatttaacag

SEQ ID NO: 10606 - DNA, 25 bp, Homo sapiens
ctggccacagttgtttgatgcatta

SEQ ID NO: 10607 - DNA, 25 bp, Homo sapiens
gactttattgcatctgggtagctgt

SEQ ID NO: 10608 - DNA, 25 bp, Homo sapiens
ggacaaactgccagttttgtttcct

SEQ ID NO: 10609 - DNA, 25 bp, Homo sapiens
gtgtctgtgttccaaccactgaatc

SEQ ID NO: 10610 - DNA, 25 bp, Homo sapiens
tgaatctggaccccatctgtgaata

SEQ ID NO: 10611 - DNA, 25 bp, Homo sapiens
ttaacagggtctctagtgctgtgaa

SEQ ID NO: 10612 - DNA, 25 bp, Homo sapiens
ttcgacttgcatttttgcaggagca

SEQ ID NO: 10613 - DNA, 25 bp, Homo sapiens
aagtagctttctggaccaacctctt

SEQ ID NO: 10614 - DNA, 25 bp, Homo sapiens
agacctgttcctggacttgatagca

SEQ ID NO: 10615 - DNA, 25 bp, Homo sapiens
agggtatctgcagattggtgccaac

SEQ ID NO: 10616 - DNA, 25 bp, Homo sapiens
atgtttggtgtcccatctgtgattg

SEQ ID NO: 10617 - DNA, 25 bp, Homo sapiens
ccaagacggtgataggagaccacgg

SEQ ID NO: 10618 - DNA, 25 bp, Homo sapiens
ccaccccagacagaacacatagagc

SEQ ID NO: 10619 - DNA, 25 bp, Homo sapiens
ctgcagattggtgccaacacccagg

SEQ ID NO: 10620 - DNA, 25 bp, Homo sapiens
gagaccacggggatgagctcttctc

SEQ ID NO: 10621 - DNA, 25 bp, Homo sapiens
gctcgcaatggaaaccccaatgggg

SEQ ID NO: 10622 - DNA, 25 bp, Homo sapiens
ggccaactttgctcgcaatggaaac

SEQ ID NO: 10623 - DNA, 25 bp, Homo sapiens
tgtggcccggaaccacagagatgct

SEQ ID NO: 10624 - DNA, 25 bp, Homo sapiens
aggagagacgaggcattcgggccgg

SEQ ID NO: 10625 - DNA, 25 bp, Homo sapiens
atgacagtgggcagcacctttctag

SEQ ID NO: 10626 - DNA, 25 bp, Homo sapiens
gcagcacctttctagcgtgagctgt

SEQ ID NO: 10627 - DNA, 25 bp, Homo sapiens
gctccgggaacagtgcatgtgcatg

SEQ ID NO: 10628 - DNA, 25 bp, Homo sapiens
ggcgtaagggttatcgttaagcaca

SEQ ID NO: 10629 - DNA, 25 bp, Homo sapiens
gtgactctaggcttcaggttgcatt

SEQ ID NO: 10630 - DNA, 25 bp, Homo sapiens
gtgcatgcataccacaagacatttc

SEQ ID NO: 10631 - DNA, 25 bp, Homo sapiens
gtgctttatactgaacgtggttgat

SEQ ID NO: 10632 - DNA, 25 bp, Homo sapiens
tacacactgtgtgggggacggcttc

SEQ ID NO: 10633 - DNA, 25 bp, Homo sapiens
tagtttgttaaagcctgttccatag

SEQ ID NO: 10634 - DNA, 25 bp, Homo sapiens
tgcattggggttcctctgtacagca

SEQ ID NO: 10635 - DNA, 25 bp, Homo sapiens
aaaatgtaaactgctcgccttattc

SEQ ID NO: 10636 - DNA, 25 bp, Homo sapiens
accatggccaattcagtttcacttt

SEQ ID NO: 10637 - DNA, 25 bp, Homo sapiens
atacttggatatcaaccctctctac

SEQ ID NO: 10638 - DNA, 25 bp, Homo sapiens
atccccctcagaacacgataaacca

SEQ ID NO: 10639 - DNA, 25 bp, Homo sapiens
gaacatgggccgcgggtaaactagc

SEQ ID NO: 10640 - DNA, 25 bp, Homo sapiens
gaagctatttcatttgctgttcatc

SEQ ID NO: 10641 - DNA, 25 bp, Homo sapiens
gtgactcaggatattaggcccagtt

SEQ ID NO: 10642 - DNA, 25 bp, Homo sapiens
taaactagctttgctctttagatgc

SEQ ID NO: 10643 - DNA, 25 bp, Homo sapiens
tattcttctgaccatctagtgactc

SEQ ID NO: 10644 - DNA, 25 bp, Homo sapiens
tgtactgtatctattcttctgacca

SEQ ID NO: 10645 - DNA, 25 bp, Homo sapiens
tttccacacattcacgcatacttgg

SEQ ID NO: 10646 - DNA, 25 bp, Homo sapiens
aaatgtcctgccttttaacgtagat

SEQ ID NO: 10647 - DNA, 25 bp, Homo sapiens
agaggcagtaaccatgcccgcatag

SEQ ID NO: 10648 - DNA, 25 bp, Homo sapiens
cagccgcttcctagaagaccaggtc

SEQ ID NO: 10649 - DNA, 25 bp, Homo sapiens
catagatgccacggaaggtccctca

SEQ ID NO: 10650 - DNA, 25 bp, Homo sapiens
ccctcagacatccccgattgaaaga

SEQ ID NO: 10651 - DNA, 25 bp, Homo sapiens
gaaacctcgggaaacttagatcatc

SEQ ID NO: 10652 - DNA, 25 bp, Homo sapiens
gacctggctgaggagctgggccatc

SEQ ID NO: 10653 - DNA, 25 bp, Homo sapiens
ggtcatgatgatgggcagcgcccga

SEQ ID NO: 10654 - DNA, 25 bp, Homo sapiens
tagatcatcagtcaccgaaggtcct

SEQ ID NO: 10655 - DNA, 25 bp, Homo sapiens
tgaggagccagcgtctagggcagca

SEQ ID NO: 10656 - DNA, 25 bp, Homo sapiens
ttaacgtagatatatgccttccccc

SEQ ID NO: 10657 - DNA, 25 bp, Homo sapiens
aagtgtcctctgatggtcaaagttc

SEQ ID NO: 10658 - DNA, 25 bp, Homo sapiens
aggaatgagggacttctcctccagt

SEQ ID NO: 10659 - DNA, 25 bp, Homo sapiens
agtcctgccatcaatgtggccgtgc

SEQ ID NO: 10660 - DNA, 25 bp, Homo sapiens
ctccccattccatgagcatgcagag

SEQ ID NO: 10661 - DNA, 25 bp, Homo sapiens
ctgccttgctggactggtatttgtg

SEQ ID NO: 10662 - DNA, 25 bp, Homo sapiens
ggagagctgcatgggctcacaactg

SEQ ID NO: 10663 - DNA, 25 bp, Homo sapiens
ggagccatttgcctctgggaaaacc

SEQ ID NO: 10664 - DNA, 25 bp, Homo sapiens
ggcaccggtgaatccaagtgtcctc

SEQ ID NO: 10665 - DNA, 25 bp, Homo sapiens
gtggccgtgcatgtgttcagaaagg

SEQ ID NO: 10666 - DNA, 25 bp, Homo sapiens
tctagatgctgtccgaggcagtcct

SEQ ID NO: 10667 - DNA, 25 bp, Homo sapiens
tggtatttgtgtctgaggctggccc

SEQ ID NO: 10668 - DNA, 25 bp, Homo sapiens
agaacttgatgctccgagatgcctc

SEQ ID NO: 10669 - DNA, 25 bp, Homo sapiens
agtactcagctgtgaagtccctgga

SEQ ID NO: 10670 - DNA, 25 bp, Homo sapiens
cctccacagtgatcccagtgatggt

SEQ ID NO: 10671 - DNA, 25 bp, Homo sapiens
gatggtatacttggaccccatggct

SEQ ID NO: 10672 - DNA, 25 bp, Homo sapiens
gattcctcgggaagaccgacagcag

SEQ ID NO: 10673 - DNA, 25 bp, Homo sapiens
gcacctttctggaggagtactcagc

SEQ ID NO: 10674 - DNA, 25 bp, Homo sapiens
ggcagaaggagtgccctggtgggtc

SEQ ID NO: 10675 - DNA, 25 bp, Homo sapiens
gtaccatgcggtgaagattcctcgg

SEQ ID NO: 10676 - DNA, 25 bp, Homo sapiens
gtccctggaagtgattgtccgggcc

SEQ ID NO: 10677 - DNA, 25 bp, Homo sapiens
tgctggtgctagcactgctggtgct

SEQ ID NO: 10678 - DNA, 25 bp, Homo sapiens
ttcaaacgggcgaagcaccccgagg

SEQ ID NO: 10679 - DNA, 25 bp, Homo sapiens
actaacaggtgatgggctttgtgcc

SEQ ID NO: 10680 - DNA, 25 bp, Homo sapiens
agacttgtcttgtctcaaagccaag

SEQ ID NO: 10681 - DNA, 25 bp, Homo sapiens
attgttgtctctgattactggaagg

SEQ ID NO: 10682 - DNA, 25 bp, Homo sapiens
catgcgtccaagacttacgggtggt

SEQ ID NO: 10683 - DNA, 25 bp, Homo sapiens
gactttctatcaaatgggaccaaac

SEQ ID NO: 10684 - DNA, 25 bp, Homo sapiens
gctgactctcagctggctaatggag

SEQ ID NO: 10685 - DNA, 25 bp, Homo sapiens
ggttaactgaatgtctgtgatcact

SEQ ID NO: 10686 - DNA, 25 bp, Homo sapiens
gtccagggtctgaattgttgtctct

SEQ ID NO: 10687 - DNA, 25 bp, Homo sapiens
gtgctagcaacagtgtcaatgtcat

SEQ ID NO: 10688 - DNA, 25 bp, Homo sapiens
gtgtgctgcatgcacatgcgtccaa

SEQ ID NO: 10689 - DNA, 25 bp, Homo sapiens
tcccggcatcaggagtcattgaaca

SEQ ID NO: 10690 - DNA, 25 bp, Homo sapiens
aaagggcaaccagcttgggtgctac

SEQ ID NO: 10691 - DNA, 25 bp, Homo sapiens
aagaggaatccctctatttcacctg

SEQ ID NO: 10692 - DNA, 25 bp, Homo sapiens
acaacacagtcactctagcaaggcc

SEQ ID NO: 10693 - DNA, 25 bp, Homo sapiens
ccaagtgtatggttgctttgcctaa

SEQ ID NO: 10694 - DNA, 25 bp, Homo sapiens
cctcatccccaaactacttgaaaag

SEQ ID NO: 10695 - DNA, 25 bp, Homo sapiens
ctagcaaggcccccaaagggccctg

SEQ ID NO: 10696 - DNA, 25 bp, Homo sapiens
gaaaagggcatttggcaccactctc

SEQ ID NO: 10697 - DNA, 25 bp, Homo sapiens
gacggtctcaatctaaaagcacttc

SEQ ID NO: 10698 - DNA, 25 bp, Homo sapiens
tatttcacctgttctggaggcacca

SEQ ID NO: 10699 - DNA, 25 bp, Homo sapiens
tgatactttatgtctttgctcaccc

SEQ ID NO: 10700 - DNA, 25 bp, Homo sapiens
tggatgttagcggtactcttccact

SEQ ID NO: 10701 - DNA, 25 bp, Homo sapiens
aaagagcaggaggttgtggacaaag

SEQ ID NO: 10702 - DNA, 25 bp, Homo sapiens
aagcagccaaacctttcctgtaaca

SEQ ID NO: 10703 - DNA, 25 bp, Homo sapiens
acctttcctgtaacagagacggtca

SEQ ID NO: 10704 - DNA, 25 bp, Homo sapiens
atgagctttcccatttcttagagga

SEQ ID NO: 10705 - DNA, 25 bp, Homo sapiens
cagagacggtcatgcaagaaagcag

SEQ ID NO: 10706 - DNA, 25 bp, Homo sapiens
ccagggactcttgttaacagtaact

SEQ ID NO: 10707 - DNA, 25 bp, Homo sapiens
gacagcaagggcttgcagcctagta

SEQ ID NO: 10708 - DNA, 25 bp, Homo sapiens
gcctttgttgccatggttactactg

SEQ ID NO: 10709 - DNA, 25 bp, Homo sapiens
tcatcaacaatgagctttcccattt

SEQ ID NO: 10710 - DNA, 25 bp, Homo sapiens
tgaaaacctctttccaaaggctgtt

SEQ ID NO: 10711 - DNA, 25 bp, Homo sapiens
ttgttgccatggttactactgcctg

SEQ ID NO: 10712 - DNA, 25 bp, Homo sapiens
aaagggctggctcggagtctagact

SEQ ID NO: 10713 - DNA, 25 bp, Homo sapiens
aagacctacctgacgtcatgtggac

SEQ ID NO: 10714 - DNA, 25 bp, Homo sapiens
aagccgtccatcagtccaaatgggg

SEQ ID NO: 10715 - DNA, 25 bp, Homo sapiens
acagccgagacgactgtccagtgac

SEQ ID NO: 10716 - DNA, 25 bp, Homo sapiens
acccaacattggcttcggagtattt

SEQ ID NO: 10717 - DNA, 25 bp, Homo sapiens
aggaggggatgggtttgtcttgtct

SEQ ID NO: 10718 - DNA, 25 bp, Homo sapiens
gccttacgctacatcttgttttcta

SEQ ID NO: 10719 - DNA, 25 bp, Homo sapiens
gtaagcactctattctccaagttgt

SEQ ID NO: 10720 - DNA, 25 bp, Homo sapiens
tccagtgaccatctcagaagccgtc

SEQ ID NO: 10721 - DNA, 25 bp, Homo sapiens
tccggaattatgctcttgtacctgt

SEQ ID NO: 10722 - DNA, 25 bp, Homo sapiens
tggactagtctcattactccggaat

SEQ ID NO: 10723 - DNA, 25 bp, Homo sapiens
ctaccagctgcagcgtggggttgtg

SEQ ID NO: 10724 - DNA, 25 bp, Homo sapiens
ctcctgcttggcgacttcagtaagc

SEQ ID NO: 10725 - DNA, 25 bp, Homo sapiens
gctaagcccatcggccggaaaagaa

SEQ ID NO: 10726 - DNA, 25 bp, Homo sapiens
gtaagctacagctaagcccatcggc

SEQ ID NO: 10727 - DNA, 25 bp, Homo sapiens
agggtagcctgaattgctttctgct

SEQ ID NO: 10728 - DNA, 25 bp, Homo sapiens
atcttgctttccccattggaactag

SEQ ID NO: 10729 - DNA, 25 bp, Homo sapiens
caatgttcaatgccacgtgctgctg

SEQ ID NO: 10730 - DNA, 25 bp, Homo sapiens
gcatttagtgctcagtccctactga

SEQ ID NO: 10731 - DNA, 25 bp, Homo sapiens
gctgacaccgaccggagtactagcc

SEQ ID NO: 10732 - DNA, 25 bp, Homo sapiens
tagtcattaacccatctctgaactg

SEQ ID NO: 10733 - DNA, 25 bp, Homo sapiens
tgaagagctagtctatcagcatctg

SEQ ID NO: 10734 - DNA, 25 bp, Homo sapiens
tggttctcagaaccatttcacccag

SEQ ID NO: 10735 - DNA, 25 bp, Homo sapiens
tggtttgggctccacattgcaatgt

SEQ ID NO: 10736 - DNA, 25 bp, Homo sapiens
ttggtttgtgaatccatcttgcttt

SEQ ID NO: 10737 - DNA, 25 bp, Homo sapiens
tttgcaagggttacacatttcactg

SEQ ID NO: 10738 - DNA, 25 bp, Homo sapiens
aagagttccattgtaatcacccttt

SEQ ID NO: 10739 - DNA, 25 bp, Homo sapiens
agattctcatccccgtagatgcaat

SEQ ID NO: 10740 - DNA, 25 bp, Homo sapiens
agcatcctcttctatggcagattct

SEQ ID NO: 10741 - DNA, 25 bp, Homo sapiens
agctgccaccgctgtagtaggattc

SEQ ID NO: 10742 - DNA, 25 bp, Homo sapiens
aggattcggatcatcacctacttca

SEQ ID NO: 10743 - DNA, 25 bp, Homo sapiens
gagagctatgacctcaaggacacgt

SEQ ID NO: 10744 - DNA, 25 bp, Homo sapiens
gcaattagtctgtcactccatttgg

SEQ ID NO: 10745 - DNA, 25 bp, Homo sapiens
gtcgatttacacttacctcggttca

SEQ ID NO: 10746 - DNA, 25 bp, Homo sapiens
tcaatggggatgcagacctctcagg

SEQ ID NO: 10747 - DNA, 25 bp, Homo sapiens
tcaccctttcctattcttcataagg

SEQ ID NO: 10748 - DNA, 25 bp, Homo sapiens
tctcgtgctatctggagtcctacac

SEQ ID NO: 10749 - DNA, 25 bp, Homo sapiens
aatgaaccaaaccaaatcatacttt

SEQ ID NO: 10750 - DNA, 25 bp, Homo sapiens
cagattctcttggctcatatttctt

SEQ ID NO: 10751 - DNA, 25 bp, Homo sapiens
ctttctcttaataagcccacatata

SEQ ID NO: 10752 - DNA, 25 bp, Homo sapiens
cttttctttctcatcttgatgatga

SEQ ID NO: 10753 - DNA, 25 bp, Homo sapiens
gaatcacttaataccgtatcttcta

SEQ ID NO: 10754 - DNA, 25 bp, Homo sapiens
gcaacaacagattctcttggctcat

SEQ ID NO: 10755 - DNA, 25 bp, Homo sapiens
ggtgatacctaaatccttcttatgt

SEQ ID NO: 10756 - DNA, 25 bp, Homo sapiens
ttaaaatagcatgcctttctctctt

SEQ ID NO: 10757 - DNA, 25 bp, Homo sapiens
ttaataccgtatcttctaaatttga

SEQ ID NO: 10758 - DNA, 25 bp, Homo sapiens
ttcttccagaaaaattctccttgag

SEQ ID NO: 10759 - DNA, 25 bp, Homo sapiens
ttttctttgaatttagcaacctaga

SEQ ID NO: 10760 - DNA, 25 bp, Homo sapiens
aactttactgtgttcctcacaatgt

SEQ ID NO: 10761 - DNA, 25 bp, Homo sapiens
aagaacctggtgcacatcatcaccc

SEQ ID NO: 10762 - DNA, 25 bp, Homo sapiens
aatgctgaccacgcaggcggagagg

SEQ ID NO: 10763 - DNA, 25 bp, Homo sapiens
aggaaaccattctcaacgcattcaa

SEQ ID NO: 10764 - DNA, 25 bp, Homo sapiens
catgttcgaacagacccaaatccag

SEQ ID NO: 10765 - DNA, 25 bp, Homo sapiens
ccaacgtgttctccatgttcgaaca

SEQ ID NO: 10766 - DNA, 25 bp, Homo sapiens
cctgacgtgactggcaacttggact

SEQ ID NO: 10767 - DNA, 25 bp, Homo sapiens
gctccgggtccaattaactttactg

SEQ ID NO: 10768 - DNA, 25 bp, Homo sapiens
gctgcccttgggcgagtgaacgtga

SEQ ID NO: 10769 - DNA, 25 bp, Homo sapiens
ggtgctgaaggctgattacgttcgg

SEQ ID NO: 10770 - DNA, 25 bp, Homo sapiens
taaggaggccttcactatcatggac

SEQ ID NO: 10771 - DNA, 25 bp, Homo sapiens
aatcctggctactgtgtgagcctga

SEQ ID NO: 10772 - DNA, 25 bp, Homo sapiens
agagattcattgcagctcagcatgg

SEQ ID NO: 10773 - DNA, 25 bp, Homo sapiens
attggagccccaagcagtgttaatc

SEQ ID NO: 10774 - DNA, 25 bp, Homo sapiens
caagaggcccagacagagttgcccc

SEQ ID NO: 10775 - DNA, 25 bp, Homo sapiens
ctacaagtcctggggcattggagcc

SEQ ID NO: 10776 - DNA, 25 bp, Homo sapiens
gaccagctcatacttcatgctgatc

SEQ ID NO: 10777 - DNA, 25 bp, Homo sapiens
gacctcaagcacaggattccagaaa

SEQ ID NO: 10778 - DNA, 25 bp, Homo sapiens
gccccaagcagtgttaatcctggct

SEQ ID NO: 10779 - DNA, 25 bp, Homo sapiens
ggagagtggcactgatgacttcaat

SEQ ID NO: 10780 - DNA, 25 bp, Homo sapiens
gtgagcctgacctcaagcacaggat

SEQ ID NO: 10781 - DNA, 25 bp, Homo sapiens
gtgccttgtgaagacaagttctcct

SEQ ID NO: 10782 - DNA, 25 bp, Homo sapiens
agtactgtaataatacctcaatgtt

SEQ ID NO: 10783 - DNA, 25 bp, Homo sapiens
cagatgccacataaggggtttgcca

SEQ ID NO: 10784 - DNA, 25 bp, Homo sapiens
gaggtggcttttgcggccagtatta

SEQ ID NO: 10785 - DNA, 25 bp, Homo sapiens
ggggtttgccatttgatacccctgg

SEQ ID NO: 10786 - DNA, 25 bp, Homo sapiens
gtaaataccattgacacatccgcct

SEQ ID NO: 10787 - DNA, 25 bp, Homo sapiens
gtactgtactaattcttacactgcc

SEQ ID NO: 10788 - DNA, 25 bp, Homo sapiens
tacactgcctgtatactttagtatg

SEQ ID NO: 10789 - DNA, 25 bp, Homo sapiens
tcatgtttggtgcatagaactgggt

SEQ ID NO: 10790 - DNA, 25 bp, Homo sapiens
tgacacatccgccttttgtatacat

SEQ ID NO: 10791 - DNA, 25 bp, Homo sapiens
tgatacccctggggaacatttctgt

SEQ ID NO: 10792 - DNA, 25 bp, Homo sapiens
tgtatatatttagtgctgcatctta

SEQ ID NO: 10793 - DNA, 25 bp, Homo sapiens
aagtcttttgttcgcatggtcacac

SEQ ID NO: 10794 - DNA, 25 bp, Homo sapiens
aatagacactccccgaagtcttttg

SEQ ID NO: 10795 - DNA, 25 bp, Homo sapiens
gaacactcttgctttattccagaat

SEQ ID NO: 10796 - DNA, 25 bp, Homo sapiens
gcctcgacacacataaaccttttta

SEQ ID NO: 10797 - DNA, 25 bp, Homo sapiens
gtgtatttacgctttgattcatagt

SEQ ID NO: 10798 - DNA, 25 bp, Homo sapiens
tatggccacagtagtcttgatgacc

SEQ ID NO: 10799 - DNA, 25 bp, Homo sapiens
tgaccaaagtcctttttttccatct

SEQ ID NO: 10800 - DNA, 25 bp, Homo sapiens
agagcaatggtggccaggctcgggc

SEQ ID NO: 10801 - DNA, 25 bp, Homo sapiens
caagtaactcctcccagagtacttc

SEQ ID NO: 10802 - DNA, 25 bp, Homo sapiens
cgcgcaccgacggaggggacatggg

SEQ ID NO: 10803 - DNA, 25 bp, Homo sapiens
ctacccacgcagatttattccagtg

SEQ ID NO: 10804 - DNA, 25 bp, Homo sapiens
gactcaggccaagaaacgtcttcta

SEQ ID NO: 10805 - DNA, 25 bp, Homo sapiens
gagtacttccaactctgggttggcc

SEQ ID NO: 10806 - DNA, 25 bp, Homo sapiens
gcatctctactcttaagagactcag

SEQ ID NO: 10807 - DNA, 25 bp, Homo sapiens
ggccccaaatccaactaatgccacc

SEQ ID NO: 10808 - DNA, 25 bp, Homo sapiens
ggcgtctggaagtccaatgtggcaa

SEQ ID NO: 10809 - DNA, 25 bp, Homo sapiens
taaacccaatccaaatggcgtctgg

SEQ ID NO: 10810 - DNA, 25 bp, Homo sapiens
tggaacttcaagtaactcctcccag

SEQ ID NO: 10811 - DNA, 25 bp, Homo sapiens
aaagtttctcagcgccgagtggact

SEQ ID NO: 10812 - DNA, 25 bp, Homo sapiens
atcgttagggtgaagcattatggtc

SEQ ID NO: 10813 - DNA, 25 bp, Homo sapiens
atgttttaaagtttaatgcctagca

SEQ ID NO: 10814 - DNA, 25 bp, Homo sapiens
caggaaagtttctcagcgccgagtg

SEQ ID NO: 10815 - DNA, 25 bp, Homo sapiens
ccctgttttgcctcaatgctaacta

SEQ ID NO: 10816 - DNA, 25 bp, Homo sapiens
gaaagaagcaggttccctgttttgc

SEQ ID NO: 10817 - DNA, 25 bp, Homo sapiens
gcctcaatgctaactaaaaagctgc

SEQ ID NO: 10818 - DNA, 25 bp, Homo sapiens
gcgccgagtggacttttgcaaagac

SEQ ID NO: 10819 - DNA, 25 bp, Homo sapiens
tctcagcgccgagtggacttttgca

SEQ ID NO: 10820 - DNA, 25 bp, Homo sapiens
tgcaaagacccaagtgcaattggaa

SEQ ID NO: 10821 - DNA, 25 bp, Homo sapiens
tgtattgaaaatggctttctcagcc

SEQ ID NO: 10822 - DNA, 25 bp, Homo sapiens
accaaacgcccgtcctatagagtgt

SEQ ID NO: 10823 - DNA, 25 bp, Homo sapiens
agaacaaccagagtgcacttttcct

SEQ ID NO: 10824 - DNA, 25 bp, Homo sapiens
ctctgtcgcgtattctgatggtgcc

SEQ ID NO: 10825 - DNA, 25 bp, Homo sapiens
cttgttcccggcagtgtgactgttt

SEQ ID NO: 10826 - DNA, 25 bp, Homo sapiens
gagtggctggtctattttgtttcct

SEQ ID NO: 10827 - DNA, 25 bp, Homo sapiens
gagtgtctgattggatcctctgtcg

SEQ ID NO: 10828 - DNA, 25 bp, Homo sapiens
ggactttgctgtcaggtccaagccc

SEQ ID NO: 10829 - DNA, 25 bp, Homo sapiens
gtccccggccaataacaaagctgtt

SEQ ID NO: 10830 - DNA, 25 bp, Homo sapiens
taggaaattgctggttgcctgtccc

SEQ ID NO: 10831 - DNA, 25 bp, Homo sapiens
tatcgtttctctaccttacgaccaa

SEQ ID NO: 10832 - DNA, 25 bp, Homo sapiens
tgcctgctggtttgacgtggagcta

SEQ ID NO: 10833 - DNA, 25 bp, Homo sapiens
aaatcagggactgctactccacaga

SEQ ID NO: 10834 - DNA, 25 bp, Homo sapiens
aacccatattatttgcgtgtacgaa

SEQ ID NO: 10835 - DNA, 25 bp, Homo sapiens
aatccacagaaatccaaacaccaag

SEQ ID NO: 10836 - DNA, 25 bp, Homo sapiens
agaacttatctactggatttccgta

SEQ ID NO: 10837 - DNA, 25 bp, Homo sapiens
gaagtcaaagtcgacccaatgatat

SEQ ID NO: 10838 - DNA, 25 bp, Homo sapiens
gaatcctgtgacaagcacttactcc

SEQ ID NO: 10839 - DNA, 25 bp, Homo sapiens
gagtctacagttataccaagtggat

SEQ ID NO: 10840 - DNA, 25 bp, Homo sapiens
gcacgccatacccttgatgaattaa

SEQ ID NO: 10841 - DNA, 25 bp, Homo sapiens
gctactccacagagatcgggatcag

SEQ ID NO: 10842 - DNA, 25 bp, Homo sapiens
gttagcaactatcgatcttgccaaa

SEQ ID NO: 10843 - DNA, 25 bp, Homo sapiens
tgctgaaacaccaagggcacgccat

SEQ ID NO: 10844 - DNA, 25 bp, Homo sapiens
agagcagccgcagtgaggtgacgga

SEQ ID NO: 10845 - DNA, 25 bp, Homo sapiens
agcaagcatctggccaatcctattc

SEQ ID NO: 10846 - DNA, 25 bp, Homo sapiens
agcagagccaggagtaccagatctt

SEQ ID NO: 10847 - DNA, 25 bp, Homo sapiens
cccagctacgctgtgagatggagca

SEQ ID NO: 10848 - DNA, 25 bp, Homo sapiens
cgcagtgaggtgacggagctccgga

SEQ ID NO: 10849 - DNA, 25 bp, Homo sapiens
ctggcccagctacgctgtgagatgg

SEQ ID NO: 10850 - DNA, 25 bp, Homo sapiens
gagccaggagtaccagatcttgctg

SEQ ID NO: 10851 - DNA, 25 bp, Homo sapiens
gctacgctgtgagatggagcagcag

SEQ ID NO: 10852 - DNA, 25 bp, Homo sapiens
gtgaggtgacggagctccggagggt

SEQ ID NO: 10853 - DNA, 25 bp, Homo sapiens
tcccagcaagcatctggccaatcct

SEQ ID NO: 10854 - DNA, 25 bp, Homo sapiens
tgacggagctccggagggtgctcca

SEQ ID NO: 10855 - DNA, 25 bp, Homo sapiens
acagggggttgaagctgagccccgc

SEQ ID NO: 10856 - DNA, 25 bp, Homo sapiens
actgcacgctctggcatgatgggat

SEQ ID NO: 10857 - DNA, 25 bp, Homo sapiens
agctcagctggggttgtgcaagcta

SEQ ID NO: 10858 - DNA, 25 bp, Homo sapiens
agtcaagggtggacactgcacgctc

SEQ ID NO: 10859 - DNA, 25 bp, Homo sapiens
catgatgggatggcgaccgggcaag

SEQ ID NO: 10860 - DNA, 25 bp, Homo sapiens
gaaaaaccagccactgctttacagg

SEQ ID NO: 10861 - DNA, 25 bp, Homo sapiens
gcaagctagggacccattcctgtgt

SEQ ID NO: 10862 - DNA, 25 bp, Homo sapiens
gcaattccccagcgtagtcaagggt

SEQ ID NO: 10863 - DNA, 25 bp, Homo sapiens
ggattttacagctacttgcaattca

SEQ ID NO: 10864 - DNA, 25 bp, Homo sapiens
gggtgattctatttctgctgtgatt

SEQ ID NO: 10865 - DNA, 25 bp, Homo sapiens
gtaatacaatgtctgcaccaatgct

SEQ ID NO: 10866 - DNA, 25 bp, Homo sapiens
aaatgatacactactgctgcagctc

SEQ ID NO: 10867 - DNA, 25 bp, Homo sapiens
acaaggaggccatcttttcctcatc

SEQ ID NO: 10868 - DNA, 25 bp, Homo sapiens
cctcctgctcctcaagagtgtggtc

SEQ ID NO: 10869 - DNA, 25 bp, Homo sapiens
cgccctgaagcagtcttctttgcta

SEQ ID NO: 10870 - DNA, 25 bp, Homo sapiens
gaagcgtcttctgaggatctagttg

SEQ ID NO: 10871 - DNA, 25 bp, Homo sapiens
gctcacaaacacctctgcatattac

SEQ ID NO: 10872 - DNA, 25 bp, Homo sapiens
tatagtgtagacatcctgcggcttc

SEQ ID NO: 10873 - DNA, 25 bp, Homo sapiens
tggaagcctttcattttacacgccc

SEQ ID NO: 10874 - DNA, 25 bp, Homo sapiens
tgggtttgggccatttcagttctca

SEQ ID NO: 10875 - DNA, 25 bp, Homo sapiens
tggtctattttgccatcatcacctg

SEQ ID NO: 10876 - DNA, 25 bp, Homo sapiens
ttcctcatcggttattgtccctaga

SEQ ID NO: 10877 - DNA, 25 bp, Homo sapiens
attcaaactgggtctcattgccaat

SEQ ID NO: 10878 - DNA, 25 bp, Homo sapiens
cagagtggatattcatgcgattatg

SEQ ID NO: 10879 - DNA, 25 bp, Homo sapiens
cataatgtctggaactttgctgaga

SEQ ID NO: 10880 - DNA, 25 bp, Homo sapiens
catgcttctcatttcaaaccttgga

SEQ ID NO: 10881 - DNA, 25 bp, Homo sapiens
gaagtgtttattagttaccattggc

SEQ ID NO: 10882 - DNA, 25 bp, Homo sapiens
gacctagcatgcttctcatttcaaa

SEQ ID NO: 10883 - DNA, 25 bp, Homo sapiens
gagacatgagtgggcacagttttca

SEQ ID NO: 10884 - DNA, 25 bp, Homo sapiens
gggtctcattgccaattttggtgga

SEQ ID NO: 10885 - DNA, 25 bp, Homo sapiens
gtgtacatagtagtcatcaagtctt

SEQ ID NO: 10886 - DNA, 25 bp, Homo sapiens
tagttaccattggcgacctagcatg

SEQ ID NO: 10887 - DNA, 25 bp, Homo sapiens
tgagtttgtgtcatttcaattacaa

SEQ ID NO: 10888 - DNA, 25 bp, Homo sapiens
aagccatctcagagccattgataca

SEQ ID NO: 10889 - DNA, 25 bp, Homo sapiens
aatggctgtcatcatgagcctcttg

SEQ ID NO: 10890 - DNA, 25 bp, Homo sapiens
agtggaactaagcctgctccagtgt

SEQ ID NO: 10891 - DNA, 25 bp, Homo sapiens
cataaagccgtttattcttccttgt

SEQ ID NO: 10892 - DNA, 25 bp, Homo sapiens
ccagtgtttcctcatcattgattat

SEQ ID NO: 10893 - DNA, 25 bp, Homo sapiens
ctttagtgacttgccatggccgctg

SEQ ID NO: 10894 - DNA, 25 bp, Homo sapiens
gaagtcccccatgtggatatttctt

SEQ ID NO: 10895 - DNA, 25 bp, Homo sapiens
gaccaaggatcaagtagtcccagta

SEQ ID NO: 10896 - DNA, 25 bp, Homo sapiens
ggccctgttgactttagtgacttgc

SEQ ID NO: 10897 - DNA, 25 bp, Homo sapiens
gtactgacttcataaaagccatctc

SEQ ID NO: 10898 - DNA, 25 bp, Homo sapiens
tacactacaaagaagtcccccatgt

SEQ ID NO: 10899 - DNA, 25 bp, Homo sapiens
ataaccgctgattctcagggtctct

SEQ ID NO: 10900 - DNA, 25 bp, Homo sapiens
caagcctctcaccattaacaggatt

SEQ ID NO: 10901 - DNA, 25 bp, Homo sapiens
cagggcctcacacggtttgaagcct

SEQ ID NO: 10902 - DNA, 25 bp, Homo sapiens
ctccctacacggagacaagcctctc

SEQ ID NO: 10903 - DNA, 25 bp, Homo sapiens
ctggaacatcatcaaggcactgcct

SEQ ID NO: 10904 - DNA, 25 bp, Homo sapiens
gaagatgtcggcagggctgggcttc

SEQ ID NO: 10905 - DNA, 25 bp, Homo sapiens
gacgccacccagcaaaaggttgttc

SEQ ID NO: 10906 - DNA, 25 bp, Homo sapiens
gagaaaaagcctccagtccaaggaa

SEQ ID NO: 10907 - DNA, 25 bp, Homo sapiens
gcctgatggacctgtcacgattgtc

SEQ ID NO: 10908 - DNA, 25 bp, Homo sapiens
gctgctggagactcctaggcaggac

SEQ ID NO: 10909 - DNA, 25 bp, Homo sapiens
gtccaaggaaaccacagctgctgga

SEQ ID NO: 10910 - DNA, 25 bp, Homo sapiens
agcaaacacaacctctggtcctata

SEQ ID NO: 10911 - DNA, 25 bp, Homo sapiens
caggagaccaagacacattccaccc

SEQ ID NO: 10912 - DNA, 25 bp, Homo sapiens
gagtcgtcagaaactccagaccagt

SEQ ID NO: 10913 - DNA, 25 bp, Homo sapiens
gtcccataccactcatggatctgaa

SEQ ID NO: 10914 - DNA, 25 bp, Homo sapiens
gtggactcaacggagaggccagcaa

SEQ ID NO: 10915 - DNA, 25 bp, Homo sapiens
taatgtcaatcgttccttatcagga

SEQ ID NO: 10916 - DNA, 25 bp, Homo sapiens
tggccttggctttgattcttgcagt

SEQ ID NO: 10917 - DNA, 25 bp, Homo sapiens
aaaatctcaaagcctgtatcgttct

SEQ ID NO: 10918 - DNA, 25 bp, Homo sapiens
aaaattactctgtctaaccacttgc

SEQ ID NO: 10919 - DNA, 25 bp, Homo sapiens
cccaaccagtaattccaccagtact

SEQ ID NO: 10920 - DNA, 25 bp, Homo sapiens
gaattccttaaacttcgctcattat

SEQ ID NO: 10921 - DNA, 25 bp, Homo sapiens
gagacttctcacttctggttggagg

SEQ ID NO: 10922 - DNA, 25 bp, Homo sapiens
ggaggtttcacatatggctcaactc

SEQ ID NO: 10923 - DNA, 25 bp, Homo sapiens
gtacatgtacagcctttgttttgct

SEQ ID NO: 10924 - DNA, 25 bp, Homo sapiens
gtcttcttggcactttcaggatttc

SEQ ID NO: 10925 - DNA, 25 bp, Homo sapiens
tatgagccggatactttccactgtc

SEQ ID NO: 10926 - DNA, 25 bp, Homo sapiens
tgccttgtctgctaccagtttgtta

SEQ ID NO: 10927 - DNA, 25 bp, Homo sapiens
ttgttttgcttgcttgtctattttt

SEQ ID NO: 10928 - DNA, 25 bp, Homo sapiens
aacctccatgaccttgagacgcatc

SEQ ID NO: 10929 - DNA, 25 bp, Homo sapiens
aactcattactgtctcctgttattt

SEQ ID NO: 10930 - DNA, 25 bp, Homo sapiens
aactctgcattaagcattccacata

SEQ ID NO: 10931 - DNA, 25 bp, Homo sapiens
aggttgctgtcggcaggctgaagac

SEQ ID NO: 10932 - DNA, 25 bp, Homo sapiens
cctgatccaattctgtgccaataac

SEQ ID NO: 10933 - DNA, 25 bp, Homo sapiens
ccttgcctcccagtggtatttgaat

SEQ ID NO: 10934 - DNA, 25 bp, Homo sapiens
gacactagaatcctgacctgtacat

SEQ ID NO: 10935 - DNA, 25 bp, Homo sapiens
gacgcatcccaggaggtgacgaggc

SEQ ID NO: 10936 - DNA, 25 bp, Homo sapiens
gggcttcccagagagtgacagctgc

SEQ ID NO: 10937 - DNA, 25 bp, Homo sapiens
tagcccctattaactctgcattaag

SEQ ID NO: 10938 - DNA, 25 bp, Homo sapiens
tgttatttatctcagtagtcccctc

SEQ ID NO: 10939 - DNA, 25 bp, Homo sapiens
aagaggctgacaggtcggggggctt

SEQ ID NO: 10940 - DNA, 25 bp, Homo sapiens
accctctatcccaggacctgagaag

SEQ ID NO: 10941 - DNA, 25 bp, Homo sapiens
actgttgcacccacactgaaagatg

SEQ ID NO: 10942 - DNA, 25 bp, Homo sapiens
ccacctatgccacagtgcctaaggg

SEQ ID NO: 10943 - DNA, 25 bp, Homo sapiens
cccctccctttctgaaggcaggaag

SEQ ID NO: 10944 - DNA, 25 bp, Homo sapiens
gaaggaggttgactgttgcacccac

SEQ ID NO: 10945 - DNA, 25 bp, Homo sapiens
gacttagtggagttctcatcccttc

SEQ ID NO: 10946 - DNA, 25 bp, Homo sapiens
ggagcctcattggggagtggggggt

SEQ ID NO: 10947 - DNA, 25 bp, Homo sapiens
tgcctaagggctaggccacccagag

SEQ ID NO: 10948 - DNA, 25 bp, Homo sapiens
tgctcaccctcctcggggaggggaa

SEQ ID NO: 10949 - DNA, 25 bp, Homo sapiens
ttggtggcatcggaggccttaccac

SEQ ID NO: 10950 - DNA, 25 bp, Homo sapiens
aacgcattccgtacagcaaggggca

SEQ ID NO: 10951 - DNA, 25 bp, Homo sapiens
aaggtgaagaacagcgctacccctt

SEQ ID NO: 10952 - DNA, 25 bp, Homo sapiens
caagaggcgcaagatctcggcagcc

SEQ ID NO: 10953 - DNA, 25 bp, Homo sapiens
ctggagaaccgcgacatgactccct

SEQ ID NO: 10954 - DNA, 25 bp, Homo sapiens
gccagttacctggacgtgtctgtgg

SEQ ID NO: 10955 - DNA, 25 bp, Homo sapiens
gcggctaacaagttcatcaccaagg

SEQ ID NO: 10956 - DNA, 25 bp, Homo sapiens
ggaacagccagatgtgttgccaggg

SEQ ID NO: 10957 - DNA, 25 bp, Homo sapiens
taccccttaagagatctccttgcct

SEQ ID NO: 10958 - DNA, 25 bp, Homo sapiens
tggacagttaccagtcttgggctct

SEQ ID NO: 10959 - DNA, 25 bp, Homo sapiens
ttcgtcgcggccgcaagaaacgcat

SEQ ID NO: 10960 - DNA, 25 bp, Homo sapiens
ttgccttctatccgggatatccggg

SEQ ID NO: 10961 - DNA, 25 bp, Homo sapiens
actgcctggattccatttatgtttt

SEQ ID NO: 10962 - DNA, 25 bp, Homo sapiens
atagaactgcctggattccatttat

SEQ ID NO: 10963 - DNA, 25 bp, Homo sapiens
ccttgactcctttggtatttcactg

SEQ ID NO: 10964 - DNA, 25 bp, Homo sapiens
ctgcacccacctacttagatatttc

SEQ ID NO: 10965 - DNA, 25 bp, Homo sapiens
cttagatatttcatgtgctatagac

SEQ ID NO: 10966 - DNA, 25 bp, Homo sapiens
gactcctttggtatttcactgaatt

SEQ ID NO: 10967 - DNA, 25 bp, Homo sapiens
gatatatcagtgttgtctcatagaa

SEQ ID NO: 10968 - DNA, 25 bp, Homo sapiens
tatgttttttctgattccatcctgt

SEQ ID NO: 10969 - DNA, 25 bp, Homo sapiens
ttcatccttgactcctttggtattt

SEQ ID NO: 10970 - DNA, 25 bp, Homo sapiens
tttcactgaatttcaaacatttgtc

SEQ ID NO: 10971 - DNA, 25 bp, Homo sapiens
tttggggcaagacagactcattaaa

SEQ ID NO: 10972 - DNA, 25 bp, Homo sapiens
aagggtggctcggggacatactgcc

SEQ ID NO: 10973 - DNA, 25 bp, Homo sapiens
agcagcagtcactggctgcgtctac

SEQ ID NO: 10974 - DNA, 25 bp, Homo sapiens
caaggcgggctgcccaaggaagcct

SEQ ID NO: 10975 - DNA, 25 bp, Homo sapiens
catggagatctcatcgccagggtgc

SEQ ID NO: 10976 - DNA, 25 bp, Homo sapiens
gataccaacagcctggcagtggtca

SEQ ID NO: 10977 - DNA, 25 bp, Homo sapiens
gatgcatttgagctgactgtgtcct

SEQ ID NO: 10978 - DNA, 25 bp, Homo sapiens
gtatcgatatggttccttttccgtc

SEQ ID NO: 10979 - DNA, 25 bp, Homo sapiens
tactgcctcaatgtgtctctggctg

SEQ ID NO: 10980 - DNA, 25 bp, Homo sapiens
tcgtgggcatcttgctggtgttgat

SEQ ID NO: 10981 - DNA, 25 bp, Homo sapiens
tctgctcttgtcccattggtgagaa

SEQ ID NO: 10982 - DNA, 25 bp, Homo sapiens
tgccgtccggtgagggggatgcatt

SEQ ID NO: 10983 - DNA, 25 bp, Homo sapiens
acaatgcatgaggcacacacacagc

SEQ ID NO: 10984 - DNA, 25 bp, Homo sapiens
ccccaaaccaccgtcagatttgatg

SEQ ID NO: 10985 - DNA, 25 bp, Homo sapiens
ctactgacctgtgctttctggtgtg

SEQ ID NO: 10986 - DNA, 25 bp, Homo sapiens
gacacacacaaagacgtgggtgacc

SEQ ID NO: 10987 - DNA, 25 bp, Homo sapiens
gacacaggtgtatgccaatgtttct

SEQ ID NO: 10988 - DNA, 25 bp, Homo sapiens
gctttctggtgtggagtccagggct

SEQ ID NO: 10989 - DNA, 25 bp, Homo sapiens
ggaggatcctcctatgttgttgaag

SEQ ID NO: 10990 - DNA, 25 bp, Homo sapiens
ggataagctggagccacaatgcatg

SEQ ID NO: 10991 - DNA, 25 bp, Homo sapiens
gtgacacaaggtggacactctctac

SEQ ID NO: 10992 - DNA, 25 bp, Homo sapiens
gtggacactctctacagatcactga

SEQ ID NO: 10993 - DNA, 25 bp, Homo sapiens
tgaagacttctcgctcagtttcagt

SEQ ID NO: 10994 - DNA, 25 bp, Homo sapiens
agagcaggaggacgctgcacaccat

SEQ ID NO: 10995 - DNA, 25 bp, Homo sapiens
gaagatggttgaacaccccacacat

SEQ ID NO: 10996 - DNA, 25 bp, Homo sapiens
gaagtagccaggtgggagcctttcc

SEQ ID NO: 10997 - DNA, 25 bp, Homo sapiens
gagaaccttgtggaatgcagctgac

SEQ ID NO: 10998 - DNA, 25 bp, Homo sapiens
gagcctttcccagtgggtgtgggac

SEQ ID NO: 10999 - DNA, 25 bp, Homo sapiens
gatgcgctcgggattggtgtgaaga

SEQ ID NO: 11000 - DNA, 25 bp, Homo sapiens
gccatagagattcacagcccagagc

SEQ ID NO: 11001 - DNA, 25 bp, Homo sapiens
gggaatgtcatggtcttgctttact

SEQ ID NO: 11002 - DNA, 25 bp, Homo sapiens
gtggcactcctggttacagatactg

SEQ ID NO: 11003 - DNA, 25 bp, Homo sapiens
tcaggtggtctatggggctatccct

SEQ ID NO: 11004 - DNA, 25 bp, Homo sapiens
tgccttcttttcacaccattggtga

SEQ ID NO: 11005 - DNA, 25 bp, Homo sapiens
aacactagggccttggaaattcctg

SEQ ID NO: 11006 - DNA, 25 bp, Homo sapiens
agcttcagttgcttgtcttctggta

SEQ ID NO: 11007 - DNA, 25 bp, Homo sapiens
cttgtcttctggtactttctgttat

SEQ ID NO: 11008 - DNA, 25 bp, Homo sapiens
gaaattcctgtactgtgtctcatgg

SEQ ID NO: 11009 - DNA, 25 bp, Homo sapiens
gaagccaatctacaatctctttttg

SEQ ID NO: 11010 - DNA, 25 bp, Homo sapiens
gccaaagcgaggcacccttactggc

SEQ ID NO: 11011 - DNA, 25 bp, Homo sapiens
gggagccagaagccaatctacaatc

SEQ ID NO: 11012 - DNA, 25 bp, Homo sapiens
gtactttctgttatgggcttttggg

SEQ ID NO: 11013 - DNA, 25 bp, Homo sapiens
gtggcctcagctcaatgcagttagc

SEQ ID NO: 11014 - DNA, 25 bp, Homo sapiens
gtgtctcatggatttggcactagcc

SEQ ID NO: 11015 - DNA, 25 bp, Homo sapiens
tcttggtaatcccctaaaataacag

SEQ ID NO: 11016 - DNA, 25 bp, Homo sapiens
agaagccttaccacgcagtaactaa

SEQ ID NO: 11017 - DNA, 25 bp, Homo sapiens
atgtgactaatgaccacacctgcct

SEQ ID NO: 11018 - DNA, 25 bp, Homo sapiens
cagctacccgtaggaagacttcgcg

SEQ ID NO: 11019 - DNA, 25 bp, Homo sapiens
ctagaaaacgcgaccttggccgcac

SEQ ID NO: 11020 - DNA, 25 bp, Homo sapiens
gacgtcatcttgtctcgaagtctct

SEQ ID NO: 11021 - DNA, 25 bp, Homo sapiens
gcagtggccctgagcagtagtggca

SEQ ID NO: 11022 - DNA, 25 bp, Homo sapiens
gcgatccatgtaatctgacgtcatc

SEQ ID NO: 11023 - DNA, 25 bp, Homo sapiens
gtattcgaggagtgccgtgtgttgc

SEQ ID NO: 11024 - DNA, 25 bp, Homo sapiens
gtggcatgtgtgtagatcaagtcgg

SEQ ID NO: 11025 - DNA, 25 bp, Homo sapiens
tgccccctctttaaaatcgatctac

SEQ ID NO: 11026 - DNA, 25 bp, Homo sapiens
tttccagactctagggttttccaat

SEQ ID NO: 11027 - DNA, 25 bp, Homo sapiens
agggggtgacggaagcagctgagaa

SEQ ID NO: 11028 - DNA, 25 bp, Homo sapiens
agtgcccgccttgagtgacatgcgg

SEQ ID NO: 11029 - DNA, 25 bp, Homo sapiens
cacgagccaccatggatgttttcaa

SEQ ID NO: 11030 - DNA, 25 bp, Homo sapiens
ccatcccctcctagcacaaggagtg

SEQ ID NO: 11031 - DNA, 25 bp, Homo sapiens
gccaacgccgtgagcaaggctgtgg

SEQ ID NO: 11032 - DNA, 25 bp, Homo sapiens
gcttctccatcgccaagaagggcgt

SEQ ID NO: 11033 - DNA, 25 bp, Homo sapiens
ggaggcggagaacatcgcggtcacc

SEQ ID NO: 11034 - DNA, 25 bp, Homo sapiens
gggggagactagagggctacaggcc

SEQ ID NO: 11035 - DNA, 25 bp, Homo sapiens
gtggatgacctgaagagcgctcctc

SEQ ID NO: 11036 - DNA, 25 bp, Homo sapiens
tggtgagcagcgtcaacactgtggc

SEQ ID NO: 11037 - DNA, 25 bp, Homo sapiens
tgtacagagcgtgacctcagtggcc

SEQ ID NO: 11038 - DNA, 25 bp, Homo sapiens
aactctccagatctgtttaccatca

SEQ ID NO: 11039 - DNA, 25 bp, Homo sapiens
acacaaacaaatgtctgctgctcta

SEQ ID NO: 11040 - DNA, 25 bp, Homo sapiens
agcagccttctttattatctaccat

SEQ ID NO: 11041 - DNA, 25 bp, Homo sapiens
catgttctagccaccctgggtgaaa

SEQ ID NO: 11042 - DNA, 25 bp, Homo sapiens
gacaatctcaaatccaagcagcctt

SEQ ID NO: 11043 - DNA, 25 bp, Homo sapiens
gacggttcaagactgagcaactccc

SEQ ID NO: 11044 - DNA, 25 bp, Homo sapiens
gagcaactccctgaatttttataca

SEQ ID NO: 11045 - DNA, 25 bp, Homo sapiens
gatgcaagccatttccaacaacaag

SEQ ID NO: 11046 - DNA, 25 bp, Homo sapiens
taatcacacccatgacaaactctcc

SEQ ID NO: 11047 - DNA, 25 bp, Homo sapiens
tcatgggtgctgaactccgccatgt

SEQ ID NO: 11048 - DNA, 25 bp, Homo sapiens
tgttgagggtctgcgtgtctttgac

SEQ ID NO: 11049 - DNA, 25 bp, Homo sapiens
agaaattgtgccatttcgcctgact

SEQ ID NO: 11050 - DNA, 25 bp, Homo sapiens
agacttttctacatgatcctcttgt

SEQ ID NO: 11051 - DNA, 25 bp, Homo sapiens
gaaagggcattccaaagcgccactg

SEQ ID NO: 11052 - DNA, 25 bp, Homo sapiens
gaagttacaatgaggctgatgcgtg

SEQ ID NO: 11053 - DNA, 25 bp, Homo sapiens
gagaaacctttgaagttccagaaat

SEQ ID NO: 11054 - DNA, 25 bp, Homo sapiens
gagggtctttttcgaagagcatgtg

SEQ ID NO: 11055 - DNA, 25 bp, Homo sapiens
gatgcgtgatcagcgagagccttta

SEQ ID NO: 11056 - DNA, 25 bp, Homo sapiens
gccatttcgcctgactcataatatg

SEQ ID NO: 11057 - DNA, 25 bp, Homo sapiens
gggtcctatgggaacagagggtctt

SEQ ID NO: 11058 - DNA, 25 bp, Homo sapiens
gtcaatgaaaaggccaagacccatg

SEQ ID NO: 11059 - DNA, 25 bp, Homo sapiens
tccaaagcgccactgaatgaaactg

SEQ ID NO: 11060 - DNA, 25 bp, Homo sapiens
aatgctgcaggctacaggcgagacc

SEQ ID NO: 11061 - DNA, 25 bp, Homo sapiens
atggctgcatcagcaccaaggagct

SEQ ID NO: 11062 - DNA, 25 bp, Homo sapiens
gacggccgcatcgactatgatgagt

SEQ ID NO: 11063 - DNA, 25 bp, Homo sapiens
gagttcaaggcagccttcgacatct

SEQ ID NO: 11064 - DNA, 25 bp, Homo sapiens
ggaggacgacatcgaggagctcatg

SEQ ID NO: 11065 - DNA, 25 bp, Homo sapiens
gggaaatctgaggagctgtctgacc

SEQ ID NO: 11066 - DNA, 25 bp, Homo sapiens
ggtggactttgatgagttcctggtc

SEQ ID NO: 11067 - DNA, 25 bp, Homo sapiens
ggttcggtgcatgaaggacgacagc

SEQ ID NO: 11068 - DNA, 25 bp, Homo sapiens
gttcctggtcatgatggttcggtgc

SEQ ID NO: 11069 - DNA, 25 bp, Homo sapiens
tacaggcgagaccatcacggaggac

SEQ ID NO: 11070 - DNA, 25 bp, Homo sapiens
tggatgacatctacaaggctgcggt

SEQ ID NO: 11071 - DNA, 25 bp, Homo sapiens
acctcaaggcctactgaccaaattg

SEQ ID NO: 11072 - DNA, 25 bp, Homo sapiens
actatgaaaccgccattgggctact

SEQ ID NO: 11073 - DNA, 25 bp, Homo sapiens
atcagactgaacttacactgtatat

SEQ ID NO: 11074 - DNA, 25 bp, Homo sapiens
attgttgtgttgagatgatatttaa

SEQ ID NO: 11075 - DNA, 25 bp, Homo sapiens
gaaaccgccattgggctactgtaga

SEQ ID NO: 11076 - DNA, 25 bp, Homo sapiens
ggcctactgaccaaattgttgtgtt

SEQ ID NO: 11077 - DNA, 25 bp, Homo sapiens
gggctactgtagatttgtatccttg

SEQ ID NO: 11078 - DNA, 25 bp, Homo sapiens
ggggtttccatcagactgaacttac

SEQ ID NO: 11079 - DNA, 25 bp, Homo sapiens
gtatattttgcaatagttacctcaa

SEQ ID NO: 11080 - DNA, 25 bp, Homo sapiens
gtatccttgatgaatctggggtttc

SEQ ID NO: 11081 - DNA, 25 bp, Homo sapiens
tagttacctcaaggcctactgacca

SEQ ID NO: 11082 - DNA, 25 bp, Homo sapiens
aatcagtgtgattagctttctcagc

SEQ ID NO: 11083 - DNA, 25 bp, Homo sapiens
aattagtattttctctgacatctca

SEQ ID NO: 11084 - DNA, 25 bp, Homo sapiens
ccttcaactcttcgtacattcaatg

SEQ ID NO: 11085 - DNA, 25 bp, Homo sapiens
ctgcgagggcccagtgaacttggtg

SEQ ID NO: 11086 - DNA, 25 bp, Homo sapiens
gaagctgaatgcctgaggggcctgg

SEQ ID NO: 11087 - DNA, 25 bp, Homo sapiens
gctttctcagcagacattgtgccat

SEQ ID NO: 11088 - DNA, 25 bp, Homo sapiens
tctatacctcctggcagattccaca

SEQ ID NO: 11089 - DNA, 25 bp, Homo sapiens
tgagccagggcaatggccctgccac

SEQ ID NO: 11090 - DNA, 25 bp, Homo sapiens
tgcccagccacattaactaacttta

SEQ ID NO: 11091 - DNA, 25 bp, Homo sapiens
ttctaagagtcccatctgctatgcc

SEQ ID NO: 11092 - DNA, 25 bp, Homo sapiens
ttgctcagcaccaccttttaatata

SEQ ID NO: 11093 - DNA, 25 bp, Homo sapiens
aacggacattcagatagcgctccct

SEQ ID NO: 11094 - DNA, 25 bp, Homo sapiens
acagctcatttgcgaacggattttt

SEQ ID NO: 11095 - DNA, 25 bp, Homo sapiens
attgatgtaggagctggtgtcatag

SEQ ID NO: 11096 - DNA, 25 bp, Homo sapiens
cctgcggaggtgggcggcatgcagc

SEQ ID NO: 11097 - DNA, 25 bp, Homo sapiens
cgacctgtacagtgcctatgattac

SEQ ID NO: 11098 - DNA, 25 bp, Homo sapiens
gcgctcccttctgggtgttatggaa

SEQ ID NO: 11099 - DNA, 25 bp, Homo sapiens
ggagaaagctgttgtgaaaacggac

SEQ ID NO: 11100 - DNA, 25 bp, Homo sapiens
ggctacgacctgtacagtgcctatg

SEQ ID NO: 11101 - DNA, 25 bp, Homo sapiens
gtaggagctggtgtcatagatgaag

SEQ ID NO: 11102 - DNA, 25 bp, Homo sapiens
tagaggaaatgttggtgttgtactg

SEQ ID NO: 11103 - DNA, 25 bp, Homo sapiens
ttgcgaacggattttttatccagaa

SEQ ID NO: 11104 - DNA, 25 bp, Homo sapiens
aatccagatggttctctgcgccatc

SEQ ID NO: 11105 - DNA, 25 bp, Homo sapiens
atagtacatggggctaccccttcca

SEQ ID NO: 11106 - DNA, 25 bp, Homo sapiens
attattaattcctatctgcttccta

SEQ ID NO: 11107 - DNA, 25 bp, Homo sapiens
cctctcaatgtggttccctggaatc

SEQ ID NO: 11108 - DNA, 25 bp, Homo sapiens
ggaagcgatttgcgatgttcacctc

SEQ ID NO: 11109 - DNA, 25 bp, Homo sapiens
gggtcctaaatgcctcatggccaat

SEQ ID NO: 11110 - DNA, 25 bp, Homo sapiens
gttcacctccacgatatttgctgtg

SEQ ID NO: 11111 - DNA, 25 bp, Homo sapiens
gtttatcatctcagccatttcaatc

SEQ ID NO: 11112 - DNA, 25 bp, Homo sapiens
tgagctgctcagactctacagcatg

SEQ ID NO: 11113 - DNA, 25 bp, Homo sapiens
tggaacaagtgccgagagcctctca

SEQ ID NO: 11114 - DNA, 25 bp, Homo sapiens
tttccaaccagctttgctcgagtta

SEQ ID NO: 11115 - DNA, 25 bp, Homo sapiens
aacaacttgcggctatccagatggc

SEQ ID NO: 11116 - DNA, 25 bp, Homo sapiens
atggccgggcaatggcagggcaggt

SEQ ID NO: 11117 - DNA, 25 bp, Homo sapiens
cagactctgacttccaagatatctt

SEQ ID NO: 11118 - DNA, 25 bp, Homo sapiens
ccgcagggagttctatctctcagac

SEQ ID NO: 11119 - DNA, 25 bp, Homo sapiens
gagaatgatctggtgcgaagcccca

SEQ ID NO: 11120 - DNA, 25 bp, Homo sapiens
gcagcatcaaccatctctgagataa

SEQ ID NO: 11121 - DNA, 25 bp, Homo sapiens
gcagggcaggtgccgtggccctgca

SEQ ID NO: 11122 - DNA, 25 bp, Homo sapiens
ggtcatcctctgcgtgtcagtaaaa

SEQ ID NO: 11123 - DNA, 25 bp, Homo sapiens
tctacagcatggccacgtggaggca

SEQ ID NO: 11124 - DNA, 25 bp, Homo sapiens
tgaggacctgccagagggcgtggac

SEQ ID NO: 11125 - DNA, 25 bp, Homo sapiens
tgcaccaggctgttgaggacctgcc

SEQ ID NO: 11126 - DNA, 25 bp, Homo sapiens
acgttacaaactctgtgtcattccc

SEQ ID NO: 11127 - DNA, 25 bp, Homo sapiens
agttcaagtacagtgactatttcaa

SEQ ID NO: 11128 - DNA, 25 bp, Homo sapiens
atcccaccacgttacaaactctgtg

SEQ ID NO: 11129 - DNA, 25 bp, Homo sapiens
cattccccgctcatgagtgtgtgga

SEQ ID NO: 11130 - DNA, 25 bp, Homo sapiens
cctggctcgcatggagttgtttctt

SEQ ID NO: 11131 - DNA, 25 bp, Homo sapiens
gacccaaaggatatcgacctcagcc

SEQ ID NO: 11132 - DNA, 25 bp, Homo sapiens
gacctcagccctatacatattgggt

SEQ ID NO: 11133 - DNA, 25 bp, Homo sapiens
tgagtgtgtggaggacaccctgaac

SEQ ID NO: 11134 - DNA, 25 bp, Homo sapiens
ttaatttgaagcctctcgttgaccc

SEQ ID NO: 11135 - DNA, 25 bp, Homo sapiens
tttcttttgttgtgtgccattttgc

SEQ ID NO: 11136 - DNA, 25 bp, Homo sapiens
agggtgattgggccaagccgaatcc

SEQ ID NO: 11137 - DNA, 25 bp, Homo sapiens
agtcgtagtgccaactctggactct

SEQ ID NO: 11138 - DNA, 25 bp, Homo sapiens
atccccaagggcacagtcgtagtgc

SEQ ID NO: 11139 - DNA, 25 bp, Homo sapiens
atgagattcagcggttcatcaccct

SEQ ID NO: 11140 - DNA, 25 bp, Homo sapiens
ccgaatccctgccatcaaggatagg

SEQ ID NO: 11141 - DNA, 25 bp, Homo sapiens
ctcctgattctcatgaaataccctg

SEQ ID NO: 11142 - DNA, 25 bp, Homo sapiens
ctggactctgttttgtatgacaacc

SEQ ID NO: 11143 - DNA, 25 bp, Homo sapiens
gacaaccaagaatttcctgatccag

SEQ ID NO: 11144 - DNA, 25 bp, Homo sapiens
gataggcaagagatgccctacatgg

SEQ ID NO: 11145 - DNA, 25 bp, Homo sapiens
tgaagcaacccgagacaccattttc

SEQ ID NO: 11146 - DNA, 25 bp, Homo sapiens
tttcagaggatacctcatccccaag

SEQ ID NO: 11147 - DNA, 25 bp, Homo sapiens
aactctgtgctgggcatttggccgg

SEQ ID NO: 11148 - DNA, 25 bp, Homo sapiens
aaggtacttttggagctggccttct

SEQ ID NO: 11149 - DNA, 25 bp, Homo sapiens
accgaatgtttcgtcactggctggg

SEQ ID NO: 11150 - DNA, 25 bp, Homo sapiens
cccaaattatgtggtcgctgaccgg

SEQ ID NO: 11151 - DNA, 25 bp, Homo sapiens
ctgcttggagaagtccccaaggcct

SEQ ID NO: 11152 - DNA, 25 bp, Homo sapiens
gaagtgaatctcgaaccgcatgttc

SEQ ID NO: 11153 - DNA, 25 bp, Homo sapiens
gcccagctccctgtgattgagaata

SEQ ID NO: 11154 - DNA, 25 bp, Homo sapiens
ggagcccacacgaaaagatattgcc

SEQ ID NO: 11155 - DNA, 25 bp, Homo sapiens
gtcgctgaccggaccgaatgtttcg

SEQ ID NO: 11156 - DNA, 25 bp, Homo sapiens
gtgtgcaatcgctatgagtttctga

SEQ ID NO: 11157 - DNA, 25 bp, Homo sapiens
tggaagagtccaatccaccgaactc

SEQ ID NO: 11158 - DNA, 25 bp, Homo sapiens
agatattgccttgctaaagctaagc

SEQ ID NO: 11159 - DNA, 25 bp, Homo sapiens
atattgccttgctaaagctaagcag

SEQ ID NO: 11160 - DNA, 25 bp, Homo sapiens
caaggccttcatcctacaaggtcat

SEQ ID NO: 11161 - DNA, 25 bp, Homo sapiens
catcctacaaggtcatcctgggtgc

SEQ ID NO: 11162 - DNA, 25 bp, Homo sapiens
cttcatcctacaaggtcatcctggg

SEQ ID NO: 11163 - DNA, 25 bp, Homo sapiens
gcactgacagttgccagggtgacag

SEQ ID NO: 11164 - DNA, 25 bp, Homo sapiens
ggtcatcctgggtgcacaccaagaa

SEQ ID NO: 11165 - DNA, 25 bp, Homo sapiens
tacaaggtcatcctgggtgcacacc

SEQ ID NO: 11166 - DNA, 25 bp, Homo sapiens
tagaagtgtctaggctgttcttgga

SEQ ID NO: 11167 - DNA, 25 bp, Homo sapiens
tcctacaaggtcatcctgggtgcac

SEQ ID NO: 11168 - DNA, 25 bp, Homo sapiens
tcctgggtgcacaccaagaagtgaa

SEQ ID NO: 11169 - DNA, 25 bp, Homo sapiens
aactcacgaagtacattctctgtct

SEQ ID NO: 11170 - DNA, 25 bp, Homo sapiens
acattctctgtcttactgatactgt

SEQ ID NO: 11171 - DNA, 25 bp, Homo sapiens
acccctactgcatggtatcgatttt

SEQ ID NO: 11172 - DNA, 25 bp, Homo sapiens
agctacttaatggttctgttctttt

SEQ ID NO: 11173 - DNA, 25 bp, Homo sapiens
cacaccgtccatttctgaagaggct

SEQ ID NO: 11174 - DNA, 25 bp, Homo sapiens
ccagtatttacttgctttcttgatt

SEQ ID NO: 11175 - DNA, 25 bp, Homo sapiens
gactgtcggaggtgagcctgtgcgt

SEQ ID NO: 11176 - DNA, 25 bp, Homo sapiens
gatactgtaggttcacccatttttt

SEQ ID NO: 11177 - DNA, 25 bp, Homo sapiens
gtgttgtcactcactgtgtattacc

SEQ ID NO: 11178 - DNA, 25 bp, Homo sapiens
ttatatgcagcaaacacaccgtcca

SEQ ID NO: 11179 - DNA, 25 bp, Homo sapiens
tttcctcgcaaataacaagacccac

SEQ ID NO: 11180 - DNA, 25 bp, Homo sapiens
acagaaccactaccaagagctcaat

SEQ ID NO: 11181 - DNA, 25 bp, Homo sapiens
acagtggaacacaacagagccctct

SEQ ID NO: 11182 - DNA, 25 bp, Homo sapiens
acctcccatccatcggaggcgtgga

SEQ ID NO: 11183 - DNA, 25 bp, Homo sapiens
agagctcaatgacatcctcaacctg

SEQ ID NO: 11184 - DNA, 25 bp, Homo sapiens
aggtcaccatgcagctgcaggacac

SEQ ID NO: 11185 - DNA, 25 bp, Homo sapiens
ataaactctccagaacacatccagc

SEQ ID NO: 11186 - DNA, 25 bp, Homo sapiens
cacctcggtcaccagtgtgaaccaa

SEQ ID NO: 11187 - DNA, 25 bp, Homo sapiens
cgagtcatggtctcgggcctgtaag

SEQ ID NO: 11188 - DNA, 25 bp, Homo sapiens
gaaccacactgggcagaggggtctg

SEQ ID NO: 11189 - DNA, 25 bp, Homo sapiens
gagccctctcgaacatgcaaagatc

SEQ ID NO: 11190 - DNA, 25 bp, Homo sapiens
gagggcctacagtcagaaaaccatc

SEQ ID NO: 11191 - DNA, 25 bp, Homo sapiens
acctctgaaaccctggaccagtggt

SEQ ID NO: 11192 - DNA, 25 bp, Homo sapiens
agccgattcacctgagcaggacctc

SEQ ID NO: 11193 - DNA, 25 bp, Homo sapiens
ccactcagctccgtgaacttgtgag

SEQ ID NO: 11194 - DNA, 25 bp, Homo sapiens
cccttggcttgcccacgtggaaaag

SEQ ID NO: 11195 - DNA, 25 bp, Homo sapiens
ctgtgctcaggactcagaagcctct

SEQ ID NO: 11196 - DNA, 25 bp, Homo sapiens
gaaaggagcccttatctgtgctcag

SEQ ID NO: 11197 - DNA, 25 bp, Homo sapiens
tacgcctgcatgtaaacacgcctgc

SEQ ID NO: 11198 - DNA, 25 bp, Homo sapiens
tagatggtcacgcacctgggtgtta

SEQ ID NO: 11199 - DNA, 25 bp, Homo sapiens
tagtatttcatgttgcacacccact

SEQ ID NO: 11200 - DNA, 25 bp, Homo sapiens
tccaggtgcccagctatacctgtgc

SEQ ID NO: 11201 - DNA, 25 bp, Homo sapiens
tctgtccctcacagcactagtattt

SEQ ID NO: 11202 - DNA, 25 bp, Homo sapiens
atactctaggtatctgtaaacactc

SEQ ID NO: 11203 - DNA, 25 bp, Homo sapiens
caactacatcccattttatatttcc

SEQ ID NO: 11204 - DNA, 25 bp, Homo sapiens
gacattcttatgcttcttttacaac

SEQ ID NO: 11205 - DNA, 25 bp, Homo sapiens
gactaacccacaggcaggttggttt

SEQ ID NO: 11206 - DNA, 25 bp, Homo sapiens
gcgttgcagcaatcagtgttaaatc

SEQ ID NO: 11207 - DNA, 25 bp, Homo sapiens
gtaaacactctgatgaagtctgtat

SEQ ID NO: 11208 - DNA, 25 bp, Homo sapiens
gtcctatggaaacctatttcaccag

SEQ ID NO: 11209 - DNA, 25 bp, Homo sapiens
gtgtggctgatctgaagtcagtcgg

SEQ ID NO: 11210 - DNA, 25 bp, Homo sapiens
tacaagaacaccaatataccccctt

SEQ ID NO: 11211 - DNA, 25 bp, Homo sapiens
ttctctcaggaaaattgcctttctc

SEQ ID NO: 11212 - DNA, 25 bp, Homo sapiens
ttgcaacaacactttactacctaac

SEQ ID NO: 11213 - DNA, 25 bp, Homo sapiens
cagccatggctggatgtgcatctgg

SEQ ID NO: 11214 - DNA, 25 bp, Homo sapiens
cctggatgtggccatagtgtttgtc

SEQ ID NO: 11215 - DNA, 25 bp, Homo sapiens
ctagagaggccgcaaggggaccgcc

SEQ ID NO: 11216 - DNA, 25 bp, Homo sapiens
gaagctgctcaacaaagtgtggaag

SEQ ID NO: 11217 - DNA, 25 bp, Homo sapiens
gctggatgtgcatctggcctatgac

SEQ ID NO: 11218 - DNA, 25 bp, Homo sapiens
gtgcattgtggctgtcaaatccatg

SEQ ID NO: 11219 - DNA, 25 bp, Homo sapiens
gtgtggaagacggactaagcctaga

SEQ ID NO: 11220 - DNA, 25 bp, Homo sapiens
tcatgttctgtgtcacgtgaccctg

SEQ ID NO: 11221 - DNA, 25 bp, Homo sapiens
tctgtagcctggtctgtgcattgtg

SEQ ID NO: 11222 - DNA, 25 bp, Homo sapiens
tgcagtagtgccaaaaggccccttc

SEQ ID NO: 11223 - DNA, 25 bp, Homo sapiens
tgcctgtgtttcatgttctgtgtca

SEQ ID NO: 11224 - DNA, 25 bp, Homo sapiens
acctcatccatggtcccaatttgta

SEQ ID NO: 11225 - DNA, 25 bp, Homo sapiens
cacctcctagttcctcataataaag

SEQ ID NO: 11226 - DNA, 25 bp, Homo sapiens
cttctcggctccatatcatggcagg

SEQ ID NO: 11227 - DNA, 25 bp, Homo sapiens
gacccctcatgggattatcctggac

SEQ ID NO: 11228 - DNA, 25 bp, Homo sapiens
gagaaggaagtcgggacccctcatg

SEQ ID NO: 11229 - DNA, 25 bp, Homo sapiens
gcccaagccacgtggacagagcttc

SEQ ID NO: 11230 - DNA, 25 bp, Homo sapiens
gcttccttggccccatgagaaggta

SEQ ID NO: 11231 - DNA, 25 bp, Homo sapiens
gggaggctataccctagtaagcggt

SEQ ID NO: 11232 - DNA, 25 bp, Homo sapiens
gtaagcggttatccgaagcggctgg

SEQ ID NO: 11233 - DNA, 25 bp, Homo sapiens
tctgtggatgcggcctttatctgcc

SEQ ID NO: 11234 - DNA, 25 bp, Homo sapiens
tgtatggaaaagtcccttggcccta

SEQ ID NO: 11235 - DNA, 25 bp, Homo sapiens
agctgtaacctgttcctattcatct

SEQ ID NO: 11236 - DNA, 25 bp, Homo sapiens
atctgaatgacacggaacgctccca

SEQ ID NO: 11237 - DNA, 25 bp, Homo sapiens
attccgcaggctcctggactggaag

SEQ ID NO: 11238 - DNA, 25 bp, Homo sapiens
cccaccgtgattcatcttctgaagc

SEQ ID NO: 11239 - DNA, 25 bp, Homo sapiens
cctaagaggcacccaatgcccaggc

SEQ ID NO: 11240 - DNA, 25 bp, Homo sapiens
gaagcagagctgaccttaggaccga

SEQ ID NO: 11241 - DNA, 25 bp, Homo sapiens
ggcaagatccctaagaggcacccaa

SEQ ID NO: 11242 - DNA, 25 bp, Homo sapiens
ggcctcctgaaaacagcactgcctt

SEQ ID NO: 11243 - DNA, 25 bp, Homo sapiens
tccgcggtcggattctggagtgtgg

SEQ ID NO: 11244 - DNA, 25 bp, Homo sapiens
ttaggaccgagcaccagggcaggtt

SEQ ID NO: 11245 - DNA, 25 bp, Homo sapiens
ttggcctgcagtaagcggtgctgac

SEQ ID NO: 11246 - DNA, 25 bp, Homo sapiens
aatagtcaggatctttatctacaga

SEQ ID NO: 11247 - DNA, 25 bp, Homo sapiens
acagatgtactctccaggttacctg

SEQ ID NO: 11248 - DNA, 25 bp, Homo sapiens
agccctgttgatcactggacataaa

SEQ ID NO: 11249 - DNA, 25 bp, Homo sapiens
atcactggacataaagcttcttttc

SEQ ID NO: 11250 - DNA, 25 bp, Homo sapiens
caggttacctgtgatgatagccccc

SEQ ID NO: 11251 - DNA, 25 bp, Homo sapiens
cattgagacctgcacatcttaatag

SEQ ID NO: 11252 - DNA, 25 bp, Homo sapiens
ctgaatgctcataaaccacaccatg

SEQ ID NO: 11253 - DNA, 25 bp, Homo sapiens
gacttacctagaagttcgcttgtaa

SEQ ID NO: 11254 - DNA, 25 bp, Homo sapiens
tcatcactatcattgagacctgcac

SEQ ID NO: 11255 - DNA, 25 bp, Homo sapiens
tgtcctgctagaaaagtctccaagc

SEQ ID NO: 11256 - DNA, 25 bp, Homo sapiens
tgtttctctcctgtgacatttcaaa

SEQ ID NO: 11257 - DNA, 25 bp, Homo sapiens
aaactgcccatctggagaatcgcct

SEQ ID NO: 11258 - DNA, 25 bp, Homo sapiens
acaggccacgttaaactgcccatct

SEQ ID NO: 11259 - DNA, 25 bp, Homo sapiens
cccaccctaatcctgtgtgatctta

SEQ ID NO: 11260 - DNA, 25 bp, Homo sapiens
ctagctctgatcctaacaggccacg

SEQ ID NO: 11261 - DNA, 25 bp, Homo sapiens
ctggagaatcgcctgcaggtggggc

SEQ ID NO: 11262 - DNA, 25 bp, Homo sapiens
ggatgctctaacgaattaccacaaa

SEQ ID NO: 11263 - DNA, 25 bp, Homo sapiens
gggtccttctccttatgtgggaaat

SEQ ID NO: 11264 - DNA, 25 bp, Homo sapiens
gtcggttgggagaaactagctctga

SEQ ID NO: 11265 - DNA, 25 bp, Homo sapiens
gtgtgatcttatcttgatccttatt

SEQ ID NO: 11266 - DNA, 25 bp, Homo sapiens
gttctctcctcttttaacaacagtc

SEQ ID NO: 11267 - DNA, 25 bp, Homo sapiens
ttccccagcttattgctgcatcact

SEQ ID NO: 11268 - DNA, 25 bp, Homo sapiens
agcagaacttgattcccttacagtt

SEQ ID NO: 11269 - DNA, 25 bp, Homo sapiens
caaacctggtggattgaaacagcag

SEQ ID NO: 11270 - DNA, 25 bp, Homo sapiens
cagggctgtggtccctttgaaggct

SEQ ID NO: 11271 - DNA, 25 bp, Homo sapiens
ccgggggcctatggcagtgatgctg

SEQ ID NO: 11272 - DNA, 25 bp, Homo sapiens
cctatggcagtgatgctgtgttggt

SEQ ID NO: 11273 - DNA, 25 bp, Homo sapiens
ccttggctctttttagcttgtggcg

SEQ ID NO: 11274 - DNA, 25 bp, Homo sapiens
gaaacagcagaacttgattccctta

SEQ ID NO: 11275 - DNA, 25 bp, Homo sapiens
ggggcctatggcagtgatgctgtgt

SEQ ID NO: 11276 - DNA, 25 bp, Homo sapiens
tgatccttattaattaaacctgcaa

SEQ ID NO: 11277 - DNA, 25 bp, Homo sapiens
tggctctttttagcttgtggcggca

SEQ ID NO: 11278 - DNA, 25 bp, Homo sapiens
ttagcttgtggcggcagtgggcagt

SEQ ID NO: 11279 - DNA, 25 bp, Homo sapiens
agaacctctcaacctggaggcttgt

SEQ ID NO: 11280 - DNA, 25 bp, Homo sapiens
attctctgctggactttttgggttc

SEQ ID NO: 11281 - DNA, 25 bp, Homo sapiens
cataaagtgttgccaccatacctcc

SEQ ID NO: 11282 - DNA, 25 bp, Homo sapiens
ccttccccgagtgactctggatttg

SEQ ID NO: 11283 - DNA, 25 bp, Homo sapiens
ctctggtccaatgaaccgacacgcc

SEQ ID NO: 11284 - DNA, 25 bp, Homo sapiens
gcataataactacttccatccctgc

SEQ ID NO: 11285 - DNA, 25 bp, Homo sapiens
gctgctatgaactgatctctggtcc

SEQ ID NO: 11286 - DNA, 25 bp, Homo sapiens
tcctacttttcatcctagtctagca

SEQ ID NO: 11287 - DNA, 25 bp, Homo sapiens
tctcctaatattccacgtttgtgcc

SEQ ID NO: 11288 - DNA, 25 bp, Homo sapiens
tggcctcgtcaatgctgtgttatga

SEQ ID NO: 11289 - DNA, 25 bp, Homo sapiens
ttctcctgggtaccatgttctactg

SEQ ID NO: 11290 - DNA, 25 bp, Homo sapiens
atatatttactcagtctttgccctg

SEQ ID NO: 11291 - DNA, 25 bp, Homo sapiens
atttctcatctgcactatgtttcca

SEQ ID NO: 11292 - DNA, 25 bp, Homo sapiens
caaggtgcctgttatatatttactc

SEQ ID NO: 11293 - DNA, 25 bp, Homo sapiens
cagggatttctgtttactgtcaaaa

SEQ ID NO: 11294 - DNA, 25 bp, Homo sapiens
ctatgtttccatttgtggtcctgaa

SEQ ID NO: 11295 - DNA, 25 bp, Homo sapiens
ctcaacatttgtctggtcttataag

SEQ ID NO: 11296 - DNA, 25 bp, Homo sapiens
cttggcaggctaacgcaggagaatc

SEQ ID NO: 11297 - DNA, 25 bp, Homo sapiens
gaatggggtgatttacagggatttc

SEQ ID NO: 11298 - DNA, 25 bp, Homo sapiens
ggggacttctggggacagacaaggt

SEQ ID NO: 11299 - DNA, 25 bp, Homo sapiens
gtctttgccctgaatggtctcagct

SEQ ID NO: 11300 - DNA, 25 bp, Homo sapiens
gtttagtagcctcaattctccatta

SEQ ID NO: 11301 - DNA, 25 bp, Homo sapiens
aagtcttgcctgacagaactcaaag

SEQ ID NO: 11302 - DNA, 25 bp, Homo sapiens
attcagaaatccttcccaaatcata

SEQ ID NO: 11303 - DNA, 25 bp, Homo sapiens
gaaatccttcccaaatcataagggc

SEQ ID NO: 11304 - DNA, 25 bp, Homo sapiens
gatttggttaagtcttgcctgacag

SEQ ID NO: 11305 - DNA, 25 bp, Homo sapiens
ggttaagtcttgcctgacagaactc

SEQ ID NO: 11306 - DNA, 25 bp, Homo sapiens
tagttacctttcattaacaaccaat

SEQ ID NO: 11307 - DNA, 25 bp, Homo sapiens
tatacctattttatctagttacctt

SEQ ID NO: 11308 - DNA, 25 bp, Homo sapiens
tcattaacaaccaattttaaccgtg

SEQ ID NO: 11309 - DNA, 25 bp, Homo sapiens
tccttctctactggaatattggtat

SEQ ID NO: 11310 - DNA, 25 bp, Homo sapiens
tcttgcctgacagaactcaaagaca

SEQ ID NO: 11311 - DNA, 25 bp, Homo sapiens
tttaaccgtgtgtcaagatttggtt

SEQ ID NO: 11312 - DNA, 25 bp, Homo sapiens
aacggactgatgtcactggctcaat

SEQ ID NO: 11313 - DNA, 25 bp, Homo sapiens
aagaagccttcagcaaagctgccca

SEQ ID NO: 11314 - DNA, 25 bp, Homo sapiens
atactggtgccagcatgaatcccgc

SEQ ID NO: 11315 - DNA, 25 bp, Homo sapiens
attgggttgggcccatcataggagc

SEQ ID NO: 11316 - DNA, 25 bp, Homo sapiens
caagactccttagaactgtcctcag

SEQ ID NO: 11317 - DNA, 25 bp, Homo sapiens
gagaggtattgtcttcagtatgact

SEQ ID NO: 11318 - DNA, 25 bp, Homo sapiens
gagtatgtcttctgtccagatgttg

SEQ ID NO: 11319 - DNA, 25 bp, Homo sapiens
ggacctgcagttatcatgggaaatt

SEQ ID NO: 11320 - DNA, 25 bp, Homo sapiens
gtgcatgtgattgacgttgaccggg

SEQ ID NO: 11321 - DNA, 25 bp, Homo sapiens
gtttactatctttgccagctgtgat

SEQ ID NO: 11322 - DNA, 25 bp, Homo sapiens
tgccagctgtgattccaaacggact

SEQ ID NO: 11323 - DNA, 25 bp, Homo sapiens
aagccgtgagtcaggcctggggtgt

SEQ ID NO: 11324 - DNA, 25 bp, Homo sapiens
agactggagcggatatcgccctgct

SEQ ID NO: 11325 - DNA, 25 bp, Homo sapiens
ccggtcagcaggatcatcgtgcacc

SEQ ID NO: 11326 - DNA, 25 bp, Homo sapiens
gaagcaggtgaaggtccccataatg

SEQ ID NO: 11327 - DNA, 25 bp, Homo sapiens
gtcactggctggggcgatgtggaca

SEQ ID NO: 11328 - DNA, 25 bp, Homo sapiens
aagttttgccctgagattcatggtt

SEQ ID NO: 11329 - DNA, 25 bp, Homo sapiens
acttcatttatctcctataattggc

SEQ ID NO: 11330 - DNA, 25 bp, Homo sapiens
cttaggggagtgccccttcactgag

SEQ ID NO: 11331 - DNA, 25 bp, Homo sapiens
gaaacttacattccaaccttagaga

SEQ ID NO: 11332 - DNA, 25 bp, Homo sapiens
gactcctagaggacagtgctatgta

SEQ ID NO: 11333 - DNA, 25 bp, Homo sapiens
gagatgtgtttctttgttgaacttt

SEQ ID NO: 11334 - DNA, 25 bp, Homo sapiens
ggcattaccatagacgactcctaga

SEQ ID NO: 11335 - DNA, 25 bp, Homo sapiens
ggtgagcacctatttcggttcgaga

SEQ ID NO: 11336 - DNA, 25 bp, Homo sapiens
ggttatggctgggtaccaccaaata

SEQ ID NO: 11337 - DNA, 25 bp, Homo sapiens
gtagctctgatgagaatggggtccc

SEQ ID NO: 11338 - DNA, 25 bp, Homo sapiens
gtattctagagctcattcatttatt

SEQ ID NO: 11339 - DNA, 25 bp, Homo sapiens
aaaggccaaacctctgttcagtgta

SEQ ID NO: 11340 - DNA, 25 bp, Homo sapiens
aaccgcccaggatcagattgcatgt

SEQ ID NO: 11341 - DNA, 25 bp, Homo sapiens
agctttcaattccgtagccagctgc

SEQ ID NO: 11342 - DNA, 25 bp, Homo sapiens
cctatgtgattttaactctgtcttc

SEQ ID NO: 11343 - DNA, 25 bp, Homo sapiens
cttccatggccctcattaatgacac

SEQ ID NO: 11344 - DNA, 25 bp, Homo sapiens
gacagaaccttgttatttctcagac

SEQ ID NO: 11345 - DNA, 25 bp, Homo sapiens
gattgcatgtgactctgaagctgac

SEQ ID NO: 11346 - DNA, 25 bp, Homo sapiens
ggcccgggtctgcggagagaggcct

SEQ ID NO: 11347 - DNA, 25 bp, Homo sapiens
taatgacacttgtccccaaatccga

SEQ ID NO: 11348 - DNA, 25 bp, Homo sapiens
tccagtgccaacaatcctagtgctt

SEQ ID NO: 11349 - DNA, 25 bp, Homo sapiens
ttccaaaagtggcctctttgtctaa

SEQ ID NO: 11350 - DNA, 25 bp, Homo sapiens
actgcagctgtcaatagcctagggc

SEQ ID NO: 11351 - DNA, 25 bp, Homo sapiens
atctttgtttattcctccacagact

SEQ ID NO: 11352 - DNA, 25 bp, Homo sapiens
caagtgaatactactgctctcatcc

SEQ ID NO: 11353 - DNA, 25 bp, Homo sapiens
cgccagagacacctagtcctgatga

SEQ ID NO: 11354 - DNA, 25 bp, Homo sapiens
gacttggacagctcctggggatgat

SEQ ID NO: 11355 - DNA, 25 bp, Homo sapiens
ggcacagatcttttcattgctattc

SEQ ID NO: 11356 - DNA, 25 bp, Homo sapiens
ggccaaatcaccgacctgaaggcgg

SEQ ID NO: 11357 - DNA, 25 bp, Homo sapiens
tagtcctgatgaaacgtctgctcct

SEQ ID NO: 11358 - DNA, 25 bp, Homo sapiens
tatcaacagcaccattcctggcatt

SEQ ID NO: 11359 - DNA, 25 bp, Homo sapiens
tctgctccttgtcctaatattcata

SEQ ID NO: 11360 - DNA, 25 bp, Homo sapiens
ttcacgggggcagtctcattaatct

SEQ ID NO: 11361 - DNA, 25 bp, Homo sapiens
aaagactctacccatattacagatg

SEQ ID NO: 11362 - DNA, 25 bp, Homo sapiens
atacagggcattttggtccaagttg

SEQ ID NO: 11363 - DNA, 25 bp, Homo sapiens
atagcataagtttctgggacctcag

SEQ ID NO: 11364 - DNA, 25 bp, Homo sapiens
ccttcctgccgcaacagttttttat

SEQ ID NO: 11365 - DNA, 25 bp, Homo sapiens
gaagccacagacctaggatttcatg

SEQ ID NO: 11366 - DNA, 25 bp, Homo sapiens
gcatcctccacaatagcagacagtg

SEQ ID NO: 11367 - DNA, 25 bp, Homo sapiens
gccgcaacagttttttatgctaatc

SEQ ID NO: 11368 - DNA, 25 bp, Homo sapiens
gctaatcagggaggtcattttggta

SEQ ID NO: 11369 - DNA, 25 bp, Homo sapiens
ggaataatacctaagccttcctgcc

SEQ ID NO: 11370 - DNA, 25 bp, Homo sapiens
tcatgatttcatttcaactgtttgc

SEQ ID NO: 11371 - DNA, 25 bp, Homo sapiens
ttggtccaagttgtgcttatcccat

SEQ ID NO: 11372 - DNA, 25 bp, Homo sapiens
aaaatctccaactccaaagccataa

SEQ ID NO: 11373 - DNA, 25 bp, Homo sapiens
aagctttgtgcagattctttacccc

SEQ ID NO: 11374 - DNA, 25 bp, Homo sapiens
accccttcagcgactagagagctac

SEQ ID NO: 11375 - DNA, 25 bp, Homo sapiens
atcaccagtggcaaatgtccccaga

SEQ ID NO: 11376 - DNA, 25 bp, Homo sapiens
gagcctgagtgttgcctaatttgtt

SEQ ID NO: 11377 - DNA, 25 bp, Homo sapiens
gaggtaacctcattatcagtccaaa

SEQ ID NO: 11378 - DNA, 25 bp, Homo sapiens
ggctttaaaacttatcctccatgaa

SEQ ID NO: 11379 - DNA, 25 bp, Homo sapiens
tctgtgccgaccccaagaagaagtg

SEQ ID NO: 11380 - DNA, 25 bp, Homo sapiens
tggccaaggatatctgtgccgaccc

SEQ ID NO: 11381 - DNA, 25 bp, Homo sapiens
tgtcacgtgtgggcaatgttccccc

SEQ ID NO: 11382 - DNA, 25 bp, Homo sapiens
tttgaaaccaaaccagagcctgagt

SEQ ID NO: 11383 - DNA, 25 bp, Homo sapiens
aactgggataccttggactaagcca

SEQ ID NO: 11384 - DNA, 25 bp, Homo sapiens
aagctcttctaactgaactttggta

SEQ ID NO: 11385 - DNA, 25 bp, Homo sapiens
aattcaccttaaataacacccagct

SEQ ID NO: 11386 - DNA, 25 bp, Homo sapiens
gactaagccagtctgtatcccaatt

SEQ ID NO: 11387 - DNA, 25 bp, Homo sapiens
gatgttatctcatgacgtgttgtca

SEQ ID NO: 11388 - DNA, 25 bp, Homo sapiens
ggtatgcggttgagctttgtaacta

SEQ ID NO: 11389 - DNA, 25 bp, Homo sapiens
gtaactatttgttctccatgaaaac

SEQ ID NO: 11390 - DNA, 25 bp, Homo sapiens
gtatcccaattcgctagcaagccta

SEQ ID NO: 11391 - DNA, 25 bp, Homo sapiens
gtcagtacaaaatgtgtcgcctcca

SEQ ID NO: 11392 - DNA, 25 bp, Homo sapiens
tctatcccgtcaaattcaccttaaa

SEQ ID NO: 11393 - DNA, 25 bp, Homo sapiens
tgtttgtttcaattcatgtagctat

SEQ ID NO: 11394 - DNA, 25 bp, Homo sapiens
aacgacatcttctgtccagcaagct

SEQ ID NO: 11395 - DNA, 25 bp, Homo sapiens
aatacgtcacttaccagtgccattg

SEQ ID NO: 11396 - DNA, 25 bp, Homo sapiens
aatagcattctacttgatcttacag

SEQ ID NO: 11397 - DNA, 25 bp, Homo sapiens
agcactgtgctctgaagtggatcag

SEQ ID NO: 11398 - DNA, 25 bp, Homo sapiens
agcaggtacatccaccagagcaaag

SEQ ID NO: 11399 - DNA, 25 bp, Homo sapiens
ccaaggctacacagaaggctccctg

SEQ ID NO: 11400 - DNA, 25 bp, Homo sapiens
gacattcaggtgtttctcaacgaca

SEQ ID NO: 11401 - DNA, 25 bp, Homo sapiens
gcaagctcggtttgaatacgtcact

SEQ ID NO: 11402 - DNA, 25 bp, Homo sapiens
ggatcagtctcaagtgtctggtaac

SEQ ID NO: 11403 - DNA, 25 bp, Homo sapiens
gtagcatgttgtcagtggccaaggc

SEQ ID NO: 11404 - DNA, 25 bp, Homo sapiens
gtgccattgcaggacccaaattcac

SEQ ID NO: 11405 - DNA, 25 bp, Homo sapiens
aaagcactgcttgccatctgtgctg

SEQ ID NO: 11406 - DNA, 25 bp, Homo sapiens
aaatttgtactgttcatggcactat

SEQ ID NO: 11407 - DNA, 25 bp, Homo sapiens
ggagctgctggttgcaattgttctc

SEQ ID NO: 11408 - DNA, 25 bp, Homo sapiens
ggttgcaattgttctctgtgttcga

SEQ ID NO: 11409 - DNA, 25 bp, Homo sapiens
gtgcaattcatgactttggtttcca

SEQ ID NO: 11410 - DNA, 25 bp, Homo sapiens
gtgttcgagacaaaccagcctattt

SEQ ID NO: 11411 - DNA, 25 bp, Homo sapiens
tacaatcatatttcctcttctatcc

SEQ ID NO: 11412 - DNA, 25 bp, Homo sapiens
tactgaatttgcctactatcctgaa

SEQ ID NO: 11413 - DNA, 25 bp, Homo sapiens
tatcctgaatttgcctactatctaa

SEQ ID NO: 11414 - DNA, 25 bp, Homo sapiens
tcctctttctagacacttccaaata

SEQ ID NO: 11415 - DNA, 25 bp, Homo sapiens
ttggagtactgtgcactcctctttc

SEQ ID NO: 11416 - DNA, 25 bp, Homo sapiens
accgaccacggttcttgacttagtg

SEQ ID NO: 11417 - DNA, 25 bp, Homo sapiens
acggttcttgacttagtggaattgg

SEQ ID NO: 11418 - DNA, 25 bp, Homo sapiens
cacgcttgacttcttatcactttgg

SEQ ID NO: 11419 - DNA, 25 bp, Homo sapiens
cgggggtggtggtgaagagagttgg

SEQ ID NO: 11420 - DNA, 25 bp, Homo sapiens
ctgtggtgccgcctagtggaaaaag

SEQ ID NO: 11421 - DNA, 25 bp, Homo sapiens
cttatcactttggctgtggtgccgc

SEQ ID NO: 11422 - DNA, 25 bp, Homo sapiens
gaaggaatggacgaattcttgagca

SEQ ID NO: 11423 - DNA, 25 bp, Homo sapiens
ggagaatgggagggctcgggctact

SEQ ID NO: 11424 - DNA, 25 bp, Homo sapiens
gggctcgggctactgagagtggaga

SEQ ID NO: 11425 - DNA, 25 bp, Homo sapiens
gtggaattgggtcgaaggagtggag

SEQ ID NO: 11426 - DNA, 25 bp, Homo sapiens
tgagtggctgagaccgaccacggtt

SEQ ID NO: 11427 - DNA, 25 bp, Homo sapiens
aaagcagcgtggcgtgttgcacatt

SEQ ID NO: 11428 - DNA, 25 bp, Homo sapiens
aacgacgtcgccgtaaagcagcgtg

SEQ ID NO: 11429 - DNA, 25 bp, Homo sapiens
acatgagcgcgtggggtgctttttc

SEQ ID NO: 11430 - DNA, 25 bp, Homo sapiens
aggggaaaacatggctcttctgctc

SEQ ID NO: 11431 - DNA, 25 bp, Homo sapiens
gagccatcgatgccctgaaaaggaa

SEQ ID NO: 11432 - DNA, 25 bp, Homo sapiens
gcgggggttgcatactcagatagtc

SEQ ID NO: 11433 - DNA, 25 bp, Homo sapiens
ggaagcttcggatgcattttccttg

SEQ ID NO: 11434 - DNA, 25 bp, Homo sapiens
gtaacgccatctttctaaccgtaag

SEQ ID NO: 11435 - DNA, 25 bp, Homo sapiens
gtcacggttattttgcttcttgcga

SEQ ID NO: 11436 - DNA, 25 bp, Homo sapiens
gtcccgttagtgagaccgagccatc

SEQ ID NO: 11437 - DNA, 25 bp, Homo sapiens
gtgcatttgcaccctaaagctgctt

SEQ ID NO: 11438 - DNA, 25 bp, Homo sapiens
aacagatgccagtgcacaaatctta

SEQ ID NO: 11439 - DNA, 25 bp, Homo sapiens
aacatagggataatggcaagccact

SEQ ID NO: 11440 - DNA, 25 bp, Homo sapiens
atggcaagccactcataatgttgtc

SEQ ID NO: 11441 - DNA, 25 bp, Homo sapiens
caagccactcataatgttgtcattt

SEQ ID NO: 11442 - DNA, 25 bp, Homo sapiens
gaatcctaggtatataatcaccttt

SEQ ID NO: 11443 - DNA, 25 bp, Homo sapiens
gatcacaccttttaatgtagctgaa

SEQ ID NO: 11444 - DNA, 25 bp, Homo sapiens
gctctggggcttcagaaggcttgaa

SEQ ID NO: 11445 - DNA, 25 bp, Homo sapiens
gttagagtaacacatatcctgcctt

SEQ ID NO: 11446 - DNA, 25 bp, Homo sapiens
gttgtcatttgaagatcacaccttt

SEQ ID NO: 11447 - DNA, 25 bp, Homo sapiens
taacacatatcctgcctttactaaa

SEQ ID NO: 11448 - DNA, 25 bp, Homo sapiens
ttataaggcctggtgcgatggctca

SEQ ID NO: 11449 - DNA, 25 bp, Homo sapiens
aatggtgctcatttcatggggtatt

SEQ ID NO: 11450 - DNA, 25 bp, Homo sapiens
atagctcccagatttcagtcttttc

SEQ ID NO: 11451 - DNA, 25 bp, Homo sapiens
attacttatttggggttgcatcaga

SEQ ID NO: 11452 - DNA, 25 bp, Homo sapiens
cagtcatcagctattcagttggtaa

SEQ ID NO: 11453 - DNA, 25 bp, Homo sapiens
gaatgatgcacatttcatgtattcc

SEQ ID NO: 11454 - DNA, 25 bp, Homo sapiens
ggtattatccattcagtcatcgtag

SEQ ID NO: 11455 - DNA, 25 bp, Homo sapiens
gtaatctgatcgttctttctagcta

SEQ ID NO: 11456 - DNA, 25 bp, Homo sapiens
gttattttctcctgatatagatcac

SEQ ID NO: 11457 - DNA, 25 bp, Homo sapiens
gtttgagacctgaatagctcccaga

SEQ ID NO: 11458 - DNA, 25 bp, Homo sapiens
ttaattagttgtgtactctggcctc

SEQ ID NO: 11459 - DNA, 25 bp, Homo sapiens
ttttctacaagtattctgcctttgc

SEQ ID NO: 11460 - DNA, 25 bp, Homo sapiens
agctgaatgaagcccagcctagcac

SEQ ID NO: 11461 - DNA, 25 bp, Homo sapiens
atcagggagggctggtgcatcccaa

SEQ ID NO: 11462 - DNA, 25 bp, Homo sapiens
caccttccaagttgttccatgggct

SEQ ID NO: 11463 - DNA, 25 bp, Homo sapiens
cagacagacagtggccgaccaggtg

SEQ ID NO: 11464 - DNA, 25 bp, Homo sapiens
cagcatgcgggattccctcattgac

SEQ ID NO: 11465 - DNA, 25 bp, Homo sapiens
gacacaaccagcacagagctgtcag

SEQ ID NO: 11466 - DNA, 25 bp, Homo sapiens
gctactgtgtcttcagcaatcaggg

SEQ ID NO: 11467 - DNA, 25 bp, Homo sapiens
ggtgcatcccaagacttcaattgaa

SEQ ID NO: 11468 - DNA, 25 bp, Homo sapiens
gtggcggggactgtgaaccgaggca

SEQ ID NO: 11469 - DNA, 25 bp, Homo sapiens
gtggtgaatgactggtgtgccttct

SEQ ID NO: 11470 - DNA, 25 bp, Homo sapiens
tgtgcttatcgcctggatctatcat

SEQ ID NO: 11471 - DNA, 25 bp, Homo sapiens
aatgtgacggtcatactgtcggtta

SEQ ID NO: 11472 - DNA, 25 bp, Homo sapiens
actctgggaggtttgctaggccctg

SEQ ID NO: 11473 - DNA, 25 bp, Homo sapiens
agtgggagagatcgctggcaccata

SEQ ID NO: 11474 - DNA, 25 bp, Homo sapiens
cctgcagtgtagctgaccctaatgt

SEQ ID NO: 11475 - DNA, 25 bp, Homo sapiens
ctgttagtgggagagatcgctggca

SEQ ID NO: 11476 - DNA, 25 bp, Homo sapiens
gacggtcatactgtcggttaatcag

SEQ ID NO: 11477 - DNA, 25 bp, Homo sapiens
gcagtgtagctgaccctaatgtgac

SEQ ID NO: 11478 - DNA, 25 bp, Homo sapiens
gctggcaccatagccttatggccaa

SEQ ID NO: 11479 - DNA, 25 bp, Homo sapiens
ggcaccatagccttatggccaacag

SEQ ID NO: 11480 - DNA, 25 bp, Homo sapiens
gtcatactgtcggttaatcagagag

SEQ ID NO: 11481 - DNA, 25 bp, Homo sapiens
gtgtagctgaccctaatgtgacggt

SEQ ID NO: 11482 - DNA, 25 bp, Homo sapiens
agaggggctccgtgaagcattttct

SEQ ID NO: 11483 - DNA, 25 bp, Homo sapiens
cccaccttgactatcccaaagattc

SEQ ID NO: 11484 - DNA, 25 bp, Homo sapiens
gaagttcctgaatctgagtcttgag

SEQ ID NO: 11485 - DNA, 25 bp, Homo sapiens
gagtacagtactctttgtcatttca

SEQ ID NO: 11486 - DNA, 25 bp, Homo sapiens
ggaatattactgctgccctgatgaa

SEQ ID NO: 11487 - DNA, 25 bp, Homo sapiens
ggagcaaggtcatgtaccctaatag

SEQ ID NO: 11488 - DNA, 25 bp, Homo sapiens
ttccttactgaaaccctctacaaag

SEQ ID NO: 11489 - DNA, 25 bp, Homo sapiens
aaatgttgcggagccagtctcagct

SEQ ID NO: 11490 - DNA, 25 bp, Homo sapiens
agaccgtgttgaaccgagcggacgc

SEQ ID NO: 11491 - DNA, 25 bp, Homo sapiens
caagccctaggaggcagccgggcgt

SEQ ID NO: 11492 - DNA, 25 bp, Homo sapiens
ctacccctcctattcagaagtttat

SEQ ID NO: 11493 - DNA, 25 bp, Homo sapiens
ctatcccggctacacgaactatggc

SEQ ID NO: 11494 - DNA, 25 bp, Homo sapiens
ctgtgcaaagactctccctatgaat

SEQ ID NO: 11495 - DNA, 25 bp, Homo sapiens
gccagtctcagctagacctgtgcaa

SEQ ID NO: 11496 - DNA, 25 bp, Homo sapiens
gcggacgctttggctaaagacccga

SEQ ID NO: 11497 - DNA, 25 bp, Homo sapiens
ggtccggggtctcatttcaatggat

SEQ ID NO: 11498 - DNA, 25 bp, Homo sapiens
gtccgacatttaacgcgggctgcgt

SEQ ID NO: 11499 - DNA, 25 bp, Homo sapiens
tggccttggcagttatttttccatc

SEQ ID NO: 11500 - DNA, 25 bp, Homo sapiens
acaccctgaaggtcctagtggagca

SEQ ID NO: 11501 - DNA, 25 bp, Homo sapiens
agcacagtttgtggcttataggtgt

SEQ ID NO: 11502 - DNA, 25 bp, Homo sapiens
caacgtgcctgatggcaccggggca

SEQ ID NO: 11503 - DNA, 25 bp, Homo sapiens
cacggggctgatgtcaacgtgcctg

SEQ ID NO: 11504 - DNA, 25 bp, Homo sapiens
cacttccaatccatctggcagttca

SEQ ID NO: 11505 - DNA, 25 bp, Homo sapiens
catgatgtttggcagcaccgccatc

SEQ ID NO: 11506 - DNA, 25 bp, Homo sapiens
ccaatccatctggcagttcaagagg

SEQ ID NO: 11507 - DNA, 25 bp, Homo sapiens
gaaggtcctagtggagcacggggct

SEQ ID NO: 11508 - DNA, 25 bp, Homo sapiens
gcagtaggggaggagcacagtttgt

SEQ ID NO: 11509 - DNA, 25 bp, Homo sapiens
ggcgctgcaggtcatgatgtttggc

SEQ ID NO: 11510 - DNA, 25 bp, Homo sapiens
tcctgcccactgctgcagtagggga

SEQ ID NO: 11511 - DNA, 25 bp, Homo sapiens
acaccatcctgagtgcagacctggt

SEQ ID NO: 11512 - DNA, 25 bp, Homo sapiens
agatagcacactgtgggaggccctg

SEQ ID NO: 11513 - DNA, 25 bp, Homo sapiens
ctccttcgtccgtgcagacaagtga

SEQ ID NO: 11514 - DNA, 25 bp, Homo sapiens
gaagctgctcagccggaaggacagc

SEQ ID NO: 11515 - DNA, 25 bp, Homo sapiens
gccctggaaatcgcccagctgaagc

SEQ ID NO: 11516 - DNA, 25 bp, Homo sapiens
ggcaccatccgatttaacctggacc

SEQ ID NO: 11517 - DNA, 25 bp, Homo sapiens
ggcattgacatcgccaaactgccgc

SEQ ID NO: 11518 - DNA, 25 bp, Homo sapiens
ggccacggaaaacatcctccaaaag

SEQ ID NO: 11519 - DNA, 25 bp, Homo sapiens
ggtgccatccttgagttcgataagc

SEQ ID NO: 11520 - DNA, 25 bp, Homo sapiens
gttcgaagggcacatcatcattgat

SEQ ID NO: 11521 - DNA, 25 bp, Homo sapiens
tgcagacctggtgatcgtcctgaag

SEQ ID NO: 11522 - DNA, 25 bp, Homo sapiens
atgtacacgtgcaagtgagccccgt

SEQ ID NO: 11523 - DNA, 25 bp, Homo sapiens
cctcccggtgcaagtcagattgctg

SEQ ID NO: 11524 - DNA, 25 bp, Homo sapiens
ctgtgggcgtggctacaacacccac

SEQ ID NO: 11525 - DNA, 25 bp, Homo sapiens
gcagcgagcgcacggagatgtacac

SEQ ID NO: 11526 - DNA, 25 bp, Homo sapiens
gctgaggagggtacttttcctgggt

SEQ ID NO: 11527 - DNA, 25 bp, Homo sapiens
ggatgctgagcttgtcttttctgct

SEQ ID NO: 11528 - DNA, 25 bp, Homo sapiens
ggcagtgcaactgtaagttccaatg

SEQ ID NO: 11529 - DNA, 25 bp, Homo sapiens
gtcagagccctcaactattctgttc

SEQ ID NO: 11530 - DNA, 25 bp, Homo sapiens
gttccaatggtgctgctatgtcaag

SEQ ID NO: 11531 - DNA, 25 bp, Homo sapiens
ttcctgcaggcatccgtgggggaaa

SEQ ID NO: 11532 - DNA, 25 bp, Homo sapiens
ttctgcagcaggaactctggacccc

SEQ ID NO: 11533 - DNA, 25 bp, Homo sapiens
cacctctgccaaggctgggtaagac

SEQ ID NO: 11534 - DNA, 25 bp, Homo sapiens
ccggctccagagttgcaagtgacag

SEQ ID NO: 11535 - DNA, 25 bp, Homo sapiens
ctgggtaagactcctctatgttgcc

SEQ ID NO: 11536 - DNA, 25 bp, Homo sapiens
gaccgaggagaagcaccacaggacc

SEQ ID NO: 11537 - DNA, 25 bp, Homo sapiens
gatgggtagatgtggcaggcatgtc

SEQ ID NO: 11538 - DNA, 25 bp, Homo sapiens
gcccctcaggcagagatggaccagg

SEQ ID NO: 11539 - DNA, 25 bp, Homo sapiens
gccgtgtgggacgagtggaggccgc

SEQ ID NO: 11540 - DNA, 25 bp, Homo sapiens
ggaccaggcggtggacagatgggta

SEQ ID NO: 11541 - DNA, 25 bp, Homo sapiens
ggcaggcatgtcatcgacagcacag

SEQ ID NO: 11542 - DNA, 25 bp, Homo sapiens
tgatggaactcaactccagcagcgg

SEQ ID NO: 11543 - DNA, 25 bp, Homo sapiens
ttgcaagtgacaggagggcccctca

SEQ ID NO: 11544 - DNA, 25 bp, Homo sapiens
aaaccctggacggagtatgtggaca

SEQ ID NO: 11545 - DNA, 25 bp, Homo sapiens
agggagtctgtgatctctttctgtg

SEQ ID NO: 11546 - DNA, 25 bp, Homo sapiens
atgacattgtgcacagacatgtctg

SEQ ID NO: 11547 - DNA, 25 bp, Homo sapiens
atggccctctaccagagcatgggct

SEQ ID NO: 11548 - DNA, 25 bp, Homo sapiens
cagtgaagttatcctggacaccggc

SEQ ID NO: 11549 - DNA, 25 bp, Homo sapiens
ccctggacggagtatgtggacatga

SEQ ID NO: 11550 - DNA, 25 bp, Homo sapiens
ccttcttctaaggtagggagtctgt

SEQ ID NO: 11551 - DNA, 25 bp, Homo sapiens
gccaggctagtggctcttcatacag

SEQ ID NO: 11552 - DNA, 25 bp, Homo sapiens
ggtagggagtctgtgatctctttct

SEQ ID NO: 11553 - DNA, 25 bp, Homo sapiens
gtggacatgacattgtgcacagaca

SEQ ID NO: 11554 - DNA, 25 bp, Homo sapiens
ttgtggacagtgagcaccgtcgtca

SEQ ID NO: 11555 - DNA, 25 bp, Homo sapiens
aatgaatgttctcctgggcagcgtt

SEQ ID NO: 11556 - DNA, 25 bp, Homo sapiens
accttcgtgactttatgcaatgcat

SEQ ID NO: 11557 - DNA, 25 bp, Homo sapiens
caatgcatcatgctatttcatacct

SEQ ID NO: 11558 - DNA, 25 bp, Homo sapiens
ctggcctctaatagtcaatgattgt

SEQ ID NO: 11559 - DNA, 25 bp, Homo sapiens
ctgttctgtcagtgaatggataatc

SEQ ID NO: 11560 - DNA, 25 bp, Homo sapiens
ggactgcaagtatatcgtggtggag

SEQ ID NO: 11561 - DNA, 25 bp, Homo sapiens
ggttatgacaaagacaactgccaaa

SEQ ID NO: 11562 - DNA, 25 bp, Homo sapiens
gtttctacacctgtgggttatgaca

SEQ ID NO: 11563 - DNA, 25 bp, Homo sapiens
tcatacctaatgagggagttccagg

SEQ ID NO: 11564 - DNA, 25 bp, Homo sapiens
tgcttctagtaggcacagggctccc

SEQ ID NO: 11565 - DNA, 25 bp, Homo sapiens
tgggcagcgttgtgatctttgccac

SEQ ID NO: 11566 - DNA, 25 bp, Homo sapiens
acgttctcagtgccaatgtcagact

SEQ ID NO: 11567 - DNA, 25 bp, Homo sapiens
agtgccaatgtcagactgtgctcct

SEQ ID NO: 11568 - DNA, 25 bp, Homo sapiens
atttcgttttgcttttggttgcctg

SEQ ID NO: 11569 - DNA, 25 bp, Homo sapiens
cctgagctgtcttgttgaaaacagt

SEQ ID NO: 11570 - DNA, 25 bp, Homo sapiens
gatgttaaacgttctcagtgccaat

SEQ ID NO: 11571 - DNA, 25 bp, Homo sapiens
gttaaacgttctcagtgccaatgtc

SEQ ID NO: 11572 - DNA, 25 bp, Homo sapiens
gttttactgatgttaaacgttctca

SEQ ID NO: 11573 - DNA, 25 bp, Homo sapiens
taaacgttctcagtgccaatgtcag

SEQ ID NO: 11574 - DNA, 25 bp, Homo sapiens
tcgttttgcttttggttgcctgaat

SEQ ID NO: 11575 - DNA, 25 bp, Homo sapiens
tggttgcctgaatgttgtcaccaag

SEQ ID NO: 11576 - DNA, 25 bp, Homo sapiens
tttggttgcctgaatgttgtcacca

SEQ ID NO: 11577 - DNA, 25 bp, Homo sapiens
aaagaagatgtactcccgcaagacg

SEQ ID NO: 11578 - DNA, 25 bp, Homo sapiens
aacttctggggctgtgacgaccagc

SEQ ID NO: 11579 - DNA, 25 bp, Homo sapiens
aagatgtactcccgcaagacgaagc

SEQ ID NO: 11580 - DNA, 25 bp, Homo sapiens
atcagcctgtacagcctgagagaga

SEQ ID NO: 11581 - DNA, 25 bp, Homo sapiens
cagcccaggatgtaccatcacacaa

SEQ ID NO: 11582 - DNA, 25 bp, Homo sapiens
caggatgtaccatcacacaatcccc

SEQ ID NO: 11583 - DNA, 25 bp, Homo sapiens
cctggccctcattgcggaacagggc

SEQ ID NO: 11584 - DNA, 25 bp, Homo sapiens
cgtcatcagcctgtacagcctgaga

SEQ ID NO: 11585 - DNA, 25 bp, Homo sapiens
ctcattgcggaacagggcctggaga

SEQ ID NO: 11586 - DNA, 25 bp, Homo sapiens
gacatcaagtggctggccaacttct

SEQ ID NO: 11587 - DNA, 25 bp, Homo sapiens
tggggctgtgacgaccagcccagga

SEQ ID NO: 11588 - DNA, 25 bp, Homo sapiens
atgccacccgcgagaatgtggaccg

SEQ ID NO: 11589 - DNA, 25 bp, Homo sapiens
cagggcctggagaacagctggcgcc

SEQ ID NO: 11590 - DNA, 25 bp, Homo sapiens
cccgctggctatgactggagagaca

SEQ ID NO: 11591 - DNA, 25 bp, Homo sapiens
ctggagaacagctggcgccagcacc

SEQ ID NO: 11592 - DNA, 25 bp, Homo sapiens
gacatcgtcagctacgtcatagacc

SEQ ID NO: 11593 - DNA, 25 bp, Homo sapiens
gcgagaatgtggaccgcgtgacgga

SEQ ID NO: 11594 - DNA, 25 bp, Homo sapiens
gctacgtcatagaccacttcgacat

SEQ ID NO: 11595 - DNA, 25 bp, Homo sapiens
ggagagacatcgtcagctacgtcat

SEQ ID NO: 11596 - DNA, 25 bp, Homo sapiens
tagaccacttcgacattgagatcat

SEQ ID NO: 11597 - DNA, 25 bp, Homo sapiens
tgtacccgctggctatgactggaga

SEQ ID NO: 11598 - DNA, 25 bp, Homo sapiens
ttgagatcatgggtggccttgggcc

SEQ ID NO: 11599 - DNA, 25 bp, Homo sapiens
aacaacaaggcccacatggtgaccc

SEQ ID NO: 11600 - DNA, 25 bp, Homo sapiens
cactgctaggctctgtctggaagat

SEQ ID NO: 11601 - DNA, 25 bp, Homo sapiens
catccttcacggagctgctccaagc

SEQ ID NO: 11602 - DNA, 25 bp, Homo sapiens
ctggcttgagtaagttccggctctc

SEQ ID NO: 11603 - DNA, 25 bp, Homo sapiens
gaccacatcctcagtacaggctgtg

SEQ ID NO: 11604 - DNA, 25 bp, Homo sapiens
gcagccttcggaggtaagtgccagc

SEQ ID NO: 11605 - DNA, 25 bp, Homo sapiens
ggactatacggtgcaggtgccgggg

SEQ ID NO: 11606 - DNA, 25 bp, Homo sapiens
ggcctactggtcattgatcatcgca

SEQ ID NO: 11607 - DNA, 25 bp, Homo sapiens
tacaagccaggccaaacctacattc

SEQ ID NO: 11608 - DNA, 25 bp, Homo sapiens
tgatcatcgcaactacgaccacatc

SEQ ID NO: 11609 - DNA, 25 bp, Homo sapiens
tgggcgacttcaagccttacaagcc

SEQ ID NO: 11610 - DNA, 25 bp, Homo sapiens
aaagattacgtcaggcagcacttcc

SEQ ID NO: 11611 - DNA, 25 bp, Homo sapiens
aacaacccagacatgcgagtgcaga

SEQ ID NO: 11612 - DNA, 25 bp, Homo sapiens
agatggtctcatcggagtcgcattt

SEQ ID NO: 11613 - DNA, 25 bp, Homo sapiens
atggggttcattggacactatcttg

SEQ ID NO: 11614 - DNA, 25 bp, Homo sapiens
ctcaccatcggggatcggtttgggg

SEQ ID NO: 11615 - DNA, 25 bp, Homo sapiens
ctcctctgctcgattatgcactgga

SEQ ID NO: 11616 - DNA, 25 bp, Homo sapiens
gaagattaccacctcgaagaagcca

SEQ ID NO: 11617 - DNA, 25 bp, Homo sapiens
gatcatgggcattggtcaccgagtg

SEQ ID NO: 11618 - DNA, 25 bp, Homo sapiens
ggagccctcaatggcatctttgtgc

SEQ ID NO: 11619 - DNA, 25 bp, Homo sapiens
gtaacagagccaggaaccctactgc

SEQ ID NO: 11620 - DNA, 25 bp, Homo sapiens
tgaagcaggggctgtatcgtcatcc

SEQ ID NO: 11621 - DNA, 25 bp, Homo sapiens
acccgctctacaatatgagccttct

SEQ ID NO: 11622 - DNA, 25 bp, Homo sapiens
caaggtatcacatcatggggccctg

SEQ ID NO: 11623 - DNA, 25 bp, Homo sapiens
cagatgaagactccagccatgacct

SEQ ID NO: 11624 - DNA, 25 bp, Homo sapiens
cagatgttgtgaaggtcctgggcct

SEQ ID NO: 11625 - DNA, 25 bp, Homo sapiens
ccccaggagtcttcagtgtgtgagc

SEQ ID NO: 11626 - DNA, 25 bp, Homo sapiens
cctgcctgaaaagcctgctgtgtac

SEQ ID NO: 11627 - DNA, 25 bp, Homo sapiens
ctccatctcctgtccaatgacatgt

SEQ ID NO: 11628 - DNA, 25 bp, Homo sapiens
gaagcatcaaagccttagaccagat

SEQ ID NO: 11629 - DNA, 25 bp, Homo sapiens
gacatgtgtgctagagcttactctg

SEQ ID NO: 11630 - DNA, 25 bp, Homo sapiens
ggtgacagagttcatgttgtgtgct

SEQ ID NO: 11631 - DNA, 25 bp, Homo sapiens
gtcagagcctgccaagatcacagat

SEQ ID NO: 11632 - DNA, 25 bp, Homo sapiens
acagcttcatgttcccaaaatcacc

SEQ ID NO: 11633 - DNA, 25 bp, Homo sapiens
aggtctcacctcgacggtgatttgc

SEQ ID NO: 11634 - DNA, 25 bp, Homo sapiens
cacgcactggcactaaatccacact

SEQ ID NO: 11635 - DNA, 25 bp, Homo sapiens
gaaacaccaaaggcggcttccagtg

SEQ ID NO: 11636 - DNA, 25 bp, Homo sapiens
gatggaaggccgggatactcacagg

SEQ ID NO: 11637 - DNA, 25 bp, Homo sapiens
gcggacccctacgagttaggagacg

SEQ ID NO: 11638 - DNA, 25 bp, Homo sapiens
gctctgctgatcggaggcttcgcag

SEQ ID NO: 11639 - DNA, 25 bp, Homo sapiens
ggaactcccgagctgagatgcggaa

SEQ ID NO: 11640 - DNA, 25 bp, Homo sapiens
tcagcaggacgactgttttcccaac

SEQ ID NO: 11641 - DNA, 25 bp, Homo sapiens
tgaacgagtgtgcagacggtgccca

SEQ ID NO: 11642 - DNA, 25 bp, Homo sapiens
tgcccatctcggagacaggcggagg

SEQ ID NO: 11643 - DNA, 25 bp, Homo sapiens
aagcaaaccataggctcctcttttc

SEQ ID NO: 11644 - DNA, 25 bp, Homo sapiens
actgtattcgtgaactgcatgctgg

SEQ ID NO: 11645 - DNA, 25 bp, Homo sapiens
agaatgtgggcttcataattttttt

SEQ ID NO: 11646 - DNA, 25 bp, Homo sapiens
agtacctgtactaactgaattgaag

SEQ ID NO: 11647 - DNA, 25 bp, Homo sapiens
ataggttcacgattcatatccaaat

SEQ ID NO: 11648 - DNA, 25 bp, Homo sapiens
atgctggaaaatgctactattatgc

SEQ ID NO: 11649 - DNA, 25 bp, Homo sapiens
ctttctgtccatagtactttttcat

SEQ ID NO: 11650 - DNA, 25 bp, Homo sapiens
gactgggtagttgtagatttctgct

SEQ ID NO: 11651 - DNA, 25 bp, Homo sapiens
gagtaatgctgctctagattgttct

SEQ ID NO: 11652 - DNA, 25 bp, Homo sapiens
ttctgacttcggtttatgttttcat

SEQ ID NO: 11653 - DNA, 25 bp, Homo sapiens
ttgtgtttcttacagaagcaaacca

SEQ ID NO: 11654 - DNA, 25 bp, Homo sapiens
aaaagctgaagccctactcaatata

SEQ ID NO: 11655 - DNA, 25 bp, Homo sapiens
aatccagtagttctgaacagctttc

SEQ ID NO: 11656 - DNA, 25 bp, Homo sapiens
acatctcacaaagcatcccgtgttc

SEQ ID NO: 11657 - DNA, 25 bp, Homo sapiens
agccaggtgtcatattcctcaccaa

SEQ ID NO: 11658 - DNA, 25 bp, Homo sapiens
agttctgaacagctttcactttgct

SEQ ID NO: 11659 - DNA, 25 bp, Homo sapiens
atcccgtgttcactcatgaaaagtt

SEQ ID NO: 11660 - DNA, 25 bp, Homo sapiens
gaagccctactcaatataataataa

SEQ ID NO: 11661 - DNA, 25 bp, Homo sapiens
gcttccactggaaaatccagtagtt

SEQ ID NO: 11662 - DNA, 25 bp, Homo sapiens
ggattgcatgaaaaagctgaagccc

SEQ ID NO: 11663 - DNA, 25 bp, Homo sapiens
tctgaacagctttcactttgctgct

SEQ ID NO: 11664 - DNA, 25 bp, Homo sapiens
ttattttgaaacgagcagcgagtgc

SEQ ID NO: 11665 - DNA, 25 bp, Homo sapiens
acggtctctcagtatctaaagtcct

SEQ ID NO: 11666 - DNA, 25 bp, Homo sapiens
agagttctgttgtaatcaccctttc

SEQ ID NO: 11667 - DNA, 25 bp, Homo sapiens
agctgccaccgctgtagtagtagtc

SEQ ID NO: 11668 - DNA, 25 bp, Homo sapiens
gacctctcaggcatgacctggagcc

SEQ ID NO: 11669 - DNA, 25 bp, Homo sapiens
gcaattagtctgtcactccatttag

SEQ ID NO: 11670 - DNA, 25 bp, Homo sapiens
gcagattctcatccccatagatgca

SEQ ID NO: 11671 - DNA, 25 bp, Homo sapiens
gggagtggaagctgcagctgccacc

SEQ ID NO: 11672 - DNA, 25 bp, Homo sapiens
gtcgaattatcatctccttcaacta

SEQ ID NO: 11673 - DNA, 25 bp, Homo sapiens
aaacctgtgcttgatctgacatttg

SEQ ID NO: 11674 - DNA, 25 bp, Homo sapiens
aactcccttggctataagcatctaa

SEQ ID NO: 11675 - DNA, 25 bp, Homo sapiens
atgtatttcataattctcccataat

SEQ ID NO: 11676 - DNA, 25 bp, Homo sapiens
gaacccttggatttatgtgaggtca

SEQ ID NO: 11677 - DNA, 25 bp, Homo sapiens
gcatctaaactcatcttctttcaat

SEQ ID NO: 11678 - DNA, 25 bp, Homo sapiens
gcatgattcaccaagcagtactaca

SEQ ID NO: 11679 - DNA, 25 bp, Homo sapiens
gctatctcctaattacttggtggct

SEQ ID NO: 11680 - DNA, 25 bp, Homo sapiens
ggtcaaaaccaaactcttattctca

SEQ ID NO: 11681 - DNA, 25 bp, Homo sapiens
gtaaccacctacaatagctttcaat

SEQ ID NO: 11682 - DNA, 25 bp, Homo sapiens
gttcacatgttccaactttcaggtt

SEQ ID NO: 11683 - DNA, 25 bp, Homo sapiens
ttcaatttcaattaactcccttggc

SEQ ID NO: 11684 - DNA, 25 bp, Homo sapiens
agctacaccaggtgaaccggccact

SEQ ID NO: 11685 - DNA, 25 bp, Homo sapiens
caccagcactactgtggtggctccg

SEQ ID NO: 11686 - DNA, 25 bp, Homo sapiens
cagctggtggctttatggtggtggc

SEQ ID NO: 11687 - DNA, 25 bp, Homo sapiens
ccggccactgaccatgcggaaggat

SEQ ID NO: 11688 - DNA, 25 bp, Homo sapiens
gaaacggggctccagtctgggaggc

SEQ ID NO: 11689 - DNA, 25 bp, Homo sapiens
gactcgaaaccgcaaggcatctgga

SEQ ID NO: 11690 - DNA, 25 bp, Homo sapiens
gcaggtactcagtgcaccaactgcc

SEQ ID NO: 11691 - DNA, 25 bp, Homo sapiens
tccggcccaagaagcgcctgattgt

SEQ ID NO: 11692 - DNA, 25 bp, Homo sapiens
tgagggcacagagcatggcctccag

SEQ ID NO: 11693 - DNA, 25 bp, Homo sapiens
tgccagtggggatcccgtgtgcaat

SEQ ID NO: 11694 - DNA, 25 bp, Homo sapiens
tggtgctgtcagggcctgttagcca

SEQ ID NO: 11695 - DNA, 25 bp, Homo sapiens
cttgagcacctcagctaaggaccgc

SEQ ID NO: 11696 - DNA, 25 bp, Homo sapiens
gaaaagggctccatttggttccagc

SEQ ID NO: 11697 - DNA, 25 bp, Homo sapiens
gacctccacgtctgatgctggggtc

SEQ ID NO: 11698 - DNA, 25 bp, Homo sapiens
gagttcctagattacctcactggga

SEQ ID NO: 11699 - DNA, 25 bp, Homo sapiens
gctgtttgcccttaggccagtacac

SEQ ID NO: 11700 - DNA, 25 bp, Homo sapiens
ggacctgcccaagatatgtattctc

SEQ ID NO: 11701 - DNA, 25 bp, Homo sapiens
gggaatagcattgtgcgtgtccgga

SEQ ID NO: 11702 - DNA, 25 bp, Homo sapiens
gtattctctgacactcttatttggt

SEQ ID NO: 11703 - DNA, 25 bp, Homo sapiens
tccagtggatccaagtactctctct

SEQ ID NO: 11704 - DNA, 25 bp, Homo sapiens
tggcagacgctttctgggacctgcc

SEQ ID NO: 11705 - DNA, 25 bp, Homo sapiens
tgggaatcccaggatgctgcccaac

SEQ ID NO: 11706 - DNA, 25 bp, Homo sapiens
aaaagctgtggagacccacctgctc

SEQ ID NO: 11707 - DNA, 25 bp, Homo sapiens
gagtgaggcgatttgacctgctcaa

SEQ ID NO: 11708 - DNA, 25 bp, Homo sapiens
aaaattgtattgtggagttttccag

SEQ ID NO: 11709 - DNA, 25 bp, Homo sapiens
aagtgtactctgtaggcttctggga

SEQ ID NO: 11710 - DNA, 25 bp, Homo sapiens
actctgtaggcttctgggaggtccc

SEQ ID NO: 11711 - DNA, 25 bp, Homo sapiens
agttttccagaggccgtgtgacatg

SEQ ID NO: 11712 - DNA, 25 bp, Homo sapiens
gaggccgtgtgacatgtgattacat

SEQ ID NO: 11713 - DNA, 25 bp, Homo sapiens
gatggtccagagcaacagttcttca

SEQ ID NO: 11714 - DNA, 25 bp, Homo sapiens
gcaacagttcttcaagtgtactctg

SEQ ID NO: 11715 - DNA, 25 bp, Homo sapiens
ggttagggtgatggtccagagcaac

SEQ ID NO: 11716 - DNA, 25 bp, Homo sapiens
gtgtccacaaagtcaaagctatttt

SEQ ID NO: 11717 - DNA, 25 bp, Homo sapiens
tgacatgtgattacatcatctttct

SEQ ID NO: 11718 - DNA, 25 bp, Homo sapiens
tttgccttttgaattctcattatct

SEQ ID NO: 11719 - DNA, 25 bp, Homo sapiens
aatgatctattgctcatcagcttta

SEQ ID NO: 11720 - DNA, 25 bp, Homo sapiens
acaacctctgagccttggtgtacag

SEQ ID NO: 11721 - DNA, 25 bp, Homo sapiens
atattttcagtacacccagttgcca

SEQ ID NO: 11722 - DNA, 25 bp, Homo sapiens
ctgtatcttgatatctcgaactttc

SEQ ID NO: 11723 - DNA, 25 bp, Homo sapiens
gaataactatgccagcaaccttgta

SEQ ID NO: 11724 - DNA, 25 bp, Homo sapiens
gaatatgaccatttgactgttcaat

SEQ ID NO: 11725 - DNA, 25 bp, Homo sapiens
gattgcagactgttcttactgtaac

SEQ ID NO: 11726 - DNA, 25 bp, Homo sapiens
gcaaccttgtaagctatctgtgcag

SEQ ID NO: 11727 - DNA, 25 bp, Homo sapiens
gtgtacagaccacctttcacaaaac

SEQ ID NO: 11728 - DNA, 25 bp, Homo sapiens
gttgccaaagttttgctgtctctta

SEQ ID NO: 11729 - DNA, 25 bp, Homo sapiens
tggaatcaatctttaacaacctctg

SEQ ID NO: 11730 - DNA, 25 bp, Homo sapiens
agctccgtgccaacgtggtaggcaa

SEQ ID NO: 11731 - DNA, 25 bp, Homo sapiens
aggaggggagccaagacactcatgc

SEQ ID NO: 11732 - DNA, 25 bp, Homo sapiens
atgtcaactacctggctttgggagc

SEQ ID NO: 11733 - DNA, 25 bp, Homo sapiens
cccctactggcggggtgctgtgtgg

SEQ ID NO: 11734 - DNA, 25 bp, Homo sapiens
ggacaaaggcttctggcttttgccc

SEQ ID NO: 11735 - DNA, 25 bp, Homo sapiens
ggcaatgtatggcgccagtaccagg

SEQ ID NO: 11736 - DNA, 25 bp, Homo sapiens
taccagtaattcaaaccttcctcat

SEQ ID NO: 11737 - DNA, 25 bp, Homo sapiens
tccacggctggaccagccttgtctt

SEQ ID NO: 11738 - DNA, 25 bp, Homo sapiens
tccttttatggccagcgcaattcag

SEQ ID NO: 11739 - DNA, 25 bp, Homo sapiens
tgctggacattctagccgacagccg

SEQ ID NO: 11740 - DNA, 25 bp, Homo sapiens
ttgggagcagtacagtgaccgcgat

SEQ ID NO: 11741 - DNA, 25 bp, Homo sapiens
aaaggatacataatgggccactgaa

SEQ ID NO: 11742 - DNA, 25 bp, Homo sapiens
aacaggtgtttttccacaagtgccg

SEQ ID NO: 11743 - DNA, 25 bp, Homo sapiens
aagttattagtggtttatcagcaaa

SEQ ID NO: 11744 - DNA, 25 bp, Homo sapiens
aatgcagtatatttcttcgttcttt

SEQ ID NO: 11745 - DNA, 25 bp, Homo sapiens
acaagtgccgcaaattgtacctttt

SEQ ID NO: 11746 - DNA, 25 bp, Homo sapiens
agacatatttaactggtgcactttg

SEQ ID NO: 11747 - DNA, 25 bp, Homo sapiens
atagattttttcagacttgtcaagc

SEQ ID NO: 11748 - DNA, 25 bp, Homo sapiens
cagacttgtcaagcctgtgcaaaaa

SEQ ID NO: 11749 - DNA, 25 bp, Homo sapiens
ccaccaggtgcctttcaaatttaga

SEQ ID NO: 11750 - DNA, 25 bp, Homo sapiens
gggccactgaaatctgtcaagagta

SEQ ID NO: 11751 - DNA, 25 bp, Homo sapiens
tggtgcactttgtaaattccctggg

SEQ ID NO: 11752 - DNA, 25 bp, Homo sapiens
aatgatccgatgatgtcctttgctg

SEQ ID NO: 11753 - DNA, 25 bp, Homo sapiens
acgtgatgcttcgcaatgatccgat

SEQ ID NO: 11754 - DNA, 25 bp, Homo sapiens
agaattcccgccggaacgtgatgct

SEQ ID NO: 11755 - DNA, 25 bp, Homo sapiens
caccaaacccagggcgctcttggtg

SEQ ID NO: 11756 - DNA, 25 bp, Homo sapiens
cactggtgctaagcaggcctcatct

SEQ ID NO: 11757 - DNA, 25 bp, Homo sapiens
ctcctccttgtactcaactagtgca

SEQ ID NO: 11758 - DNA, 25 bp, Homo sapiens
cttgggtcagccaaacaccagcagc

SEQ ID NO: 11759 - DNA, 25 bp, Homo sapiens
gaacgtggggaacttcactggtgct

SEQ ID NO: 11760 - DNA, 25 bp, Homo sapiens
gtgccttgtcgaattctgtcagcaa

SEQ ID NO: 11761 - DNA, 25 bp, Homo sapiens
tctcctgtcagccagtctatgcaaa

SEQ ID NO: 11762 - DNA, 25 bp, Homo sapiens
tggtcaatcagaacttgctccacca

SEQ ID NO: 11763 - DNA, 25 bp, Homo sapiens
agcaacaggctcagcagcagtcgcc

SEQ ID NO: 11764 - DNA, 25 bp, Homo sapiens
aggacaaggcggcgcagcagcaact

SEQ ID NO: 11765 - DNA, 25 bp, Homo sapiens
ccttgctatacggtcggacctggtg

SEQ ID NO: 11766 - DNA, 25 bp, Homo sapiens
cgcccacgcaggtcaagatctggtt

SEQ ID NO: 11767 - DNA, 25 bp, Homo sapiens
cggacctggtgagaggacggcgggc

SEQ ID NO: 11768 - DNA, 25 bp, Homo sapiens
cggcaaaccgtgccaagcgggtgcc

SEQ ID NO: 11769 - DNA, 25 bp, Homo sapiens
cggtgccggtcctggtgaaagacgg

SEQ ID NO: 11770 - DNA, 25 bp, Homo sapiens
gatctggttccagaaccaccgctac

SEQ ID NO: 11771 - DNA, 25 bp, Homo sapiens
gcagcaactgcagcaggacagcggc

SEQ ID NO: 11772 - DNA, 25 bp, Homo sapiens
tccagaaccaccgctacaaaatgaa

SEQ ID NO: 11773 - DNA, 25 bp, Homo sapiens
tgaagcgccaggccaaggacaaggc

SEQ ID NO: 11774 - DNA, 25 bp, Homo sapiens
acggctatggtgtgtcgtacatcct

SEQ ID NO: 11775 - DNA, 25 bp, Homo sapiens
agcatcagcatatgtatcgcctcgc

SEQ ID NO: 11776 - DNA, 25 bp, Homo sapiens
agtggagctgtttgacttggagaat

SEQ ID NO: 11777 - DNA, 25 bp, Homo sapiens
agttggcgtctgagaagcatcagca

SEQ ID NO: 11778 - DNA, 25 bp, Homo sapiens
cttctgcctttacgtggtgtctaaa

SEQ ID NO: 11779 - DNA, 25 bp, Homo sapiens
ggaccggttgctgatgacggctatg

SEQ ID NO: 11780 - DNA, 25 bp, Homo sapiens
ggagattatcaacaagccagacccc

SEQ ID NO: 11781 - DNA, 25 bp, Homo sapiens
gtccagcggagggggctttggaccg

SEQ ID NO: 11782 - DNA, 25 bp, Homo sapiens
gtgggagagaacctcatcaatttcc

SEQ ID NO: 11783 - DNA, 25 bp, Homo sapiens
taaatatctcgctgtggagtcccct

SEQ ID NO: 11784 - DNA, 25 bp, Homo sapiens
taacccagagtacgtgtccagcgga

SEQ ID NO: 11785 - DNA, 25 bp, Homo sapiens
aagctgcttgctgtaactgtgtgag

SEQ ID NO: 11786 - DNA, 25 bp, Homo sapiens
aagtgtcctggaaagtctgctgctt

SEQ ID NO: 11787 - DNA, 25 bp, Homo sapiens
accccagagccatccgatcgatgga

SEQ ID NO: 11788 - DNA, 25 bp, Homo sapiens
caagaatgtgcactctctgcttagg

SEQ ID NO: 11789 - DNA, 25 bp, Homo sapiens
caaggtgttctctgtagctcaatct

SEQ ID NO: 11790 - DNA, 25 bp, Homo sapiens
caatctgcaaacatgccaggcctca

SEQ ID NO: 11791 - DNA, 25 bp, Homo sapiens
caggaaggaccttgctttggaccct

SEQ ID NO: 11792 - DNA, 25 bp, Homo sapiens
ctctgatttccttctgctatgacaa

SEQ ID NO: 11793 - DNA, 25 bp, Homo sapiens
gatggatgggatgcactctcagacc

SEQ ID NO: 11794 - DNA, 25 bp, Homo sapiens
gccagagcgtgctttcaagtgtcct

SEQ ID NO: 11795 - DNA, 25 bp, Homo sapiens
tctgcaccttacaactcggggacaa

SEQ ID NO: 11796 - DNA, 25 bp, Homo sapiens
aagtatgcatcagtgcttcccactt

SEQ ID NO: 11797 - DNA, 25 bp, Homo sapiens
ataattggtccatggctacactgca

SEQ ID NO: 11798 - DNA, 25 bp, Homo sapiens
ccatgtggcaacattctgtcagcct

SEQ ID NO: 11799 - DNA, 25 bp, Homo sapiens
cccacttacctgatttgtctgtcgg

SEQ ID NO: 11800 - DNA, 25 bp, Homo sapiens
cccatatggaaaccctgcgtgtctg

SEQ ID NO: 11801 - DNA, 25 bp, Homo sapiens
taacaggtgaattcccgactctttt

SEQ ID NO: 11802 - DNA, 25 bp, Homo sapiens
tctgcccttggacccatttattatt

SEQ ID NO: 11803 - DNA, 25 bp, Homo sapiens
tggggagaacctatctgcatggacc

SEQ ID NO: 11804 - DNA, 25 bp, Homo sapiens
tgtcagcctctttcatagtgtgcaa

SEQ ID NO: 11805 - DNA, 25 bp, Homo sapiens
tgtgatgcccatgacacctgcaaaa

SEQ ID NO: 11806 - DNA, 25 bp, Homo sapiens
ttctaaatggtgactctctgccctt

SEQ ID NO: 11807 - DNA, 25 bp, Homo sapiens
acgggacaggctggacccagagact

SEQ ID NO: 11808 - DNA, 25 bp, Homo sapiens
catgtgggaagtgggctccttcacc

SEQ ID NO: 11809 - DNA, 25 bp, Homo sapiens
ccacgggacaggctggacccagaga

SEQ ID NO: 11810 - DNA, 25 bp, Homo sapiens
ctgacctggggtcagacccgtgggc

SEQ ID NO: 11811 - DNA, 25 bp, Homo sapiens
gacaggctggacccagagactctgg

SEQ ID NO: 11812 - DNA, 25 bp, Homo sapiens
gctgttgtgaggggcgctgtgatgc

SEQ ID NO: 11813 - DNA, 25 bp, Homo sapiens
ggacaggctggacccagagactctg

SEQ ID NO: 11814 - DNA, 25 bp, Homo sapiens
gtgatgcggttccaaagcacagggc

SEQ ID NO: 11815 - DNA, 25 bp, Homo sapiens
tgacctggggtcagacccgtgggct

SEQ ID NO: 11816 - DNA, 25 bp, Homo sapiens
tgatgcggttccaaagcacagggct

SEQ ID NO: 11817 - DNA, 25 bp, Homo sapiens
tgttgtgaggggcgctgtgatgcgg

SEQ ID NO: 11818 - DNA, 25 bp, Homo sapiens
acctctgcgagtacgacttcgtcaa

SEQ ID NO: 11819 - DNA, 25 bp, Homo sapiens
atgccaatgaccaggagcggcgctg

SEQ ID NO: 11820 - DNA, 25 bp, Homo sapiens
cagaagccagagccagcctgctggc

SEQ ID NO: 11821 - DNA, 25 bp, Homo sapiens
cattgacgagtgccaggtggccccg

SEQ ID NO: 11822 - DNA, 25 bp, Homo sapiens
cctgctcagagcagagcctctagcc

SEQ ID NO: 11823 - DNA, 25 bp, Homo sapiens
cgacttcgtcaagctgagctcgggg

SEQ ID NO: 11824 - DNA, 25 bp, Homo sapiens
cggcctgcccagcaggtcagaagcc

SEQ ID NO: 11825 - DNA, 25 bp, Homo sapiens
ctccgactactccaacgagaagccg

SEQ ID NO: 11826 - DNA, 25 bp, Homo sapiens
gagaagccgttcacggggttcgagg

SEQ ID NO: 11827 - DNA, 25 bp, Homo sapiens
gccttctatgcagccgaggacattg

SEQ ID NO: 11828 - DNA, 25 bp, Homo sapiens
tgggctgagatggctgtgccccaac

SEQ ID NO: 11829 - DNA, 25 bp, Homo sapiens
agatctatttctactggatctgcag

SEQ ID NO: 11830 - DNA, 25 bp, Homo sapiens
agggagacaggtgccttttcctggt

SEQ ID NO: 11831 - DNA, 25 bp, Homo sapiens
atctgcagggagacaggtgcctttt

SEQ ID NO: 11832 - DNA, 25 bp, Homo sapiens
atggaggaattaggcaaagtgggtt

SEQ ID NO: 11833 - DNA, 25 bp, Homo sapiens
cagcaatattgttggtcatgcagca

SEQ ID NO: 11834 - DNA, 25 bp, Homo sapiens
cctggttcaacaacctgttgacttc

SEQ ID NO: 11835 - DNA, 25 bp, Homo sapiens
gggacagcaatattgttggtcatgc

SEQ ID NO: 11836 - DNA, 25 bp, Homo sapiens
gttcaacaacctgttgacttccctg

SEQ ID NO: 11837 - DNA, 25 bp, Homo sapiens
tcttcctcaccggatgggacagcaa

SEQ ID NO: 11838 - DNA, 25 bp, Homo sapiens
tgcagggagacaggtgccttttcct

SEQ ID NO: 11839 - DNA, 25 bp, Homo sapiens
ttcctcaccggatgggacagcaata

SEQ ID NO: 11840 - DNA, 25 bp, Homo sapiens
aaatgcacgcaagccattatctctc

SEQ ID NO: 11841 - DNA, 25 bp, Homo sapiens
aaattgtggagttagcctcctgtgg

SEQ ID NO: 11842 - DNA, 25 bp, Homo sapiens
agagttgtgaactgttatcccattg

SEQ ID NO: 11843 - DNA, 25 bp, Homo sapiens
agccattatctctccatgggaagct

SEQ ID NO: 11844 - DNA, 25 bp, Homo sapiens
aggctttgcacatttctatatgagt

SEQ ID NO: 11845 - DNA, 25 bp, Homo sapiens
gaccgagccttgtatgtatgttatg

SEQ ID NO: 11846 - DNA, 25 bp, Homo sapiens
gtggagttagcctcctgtggtaaag

SEQ ID NO: 11847 - DNA, 25 bp, Homo sapiens
gttctggctaactttggaatccatt

SEQ ID NO: 11848 - DNA, 25 bp, Homo sapiens
gtttgtcatatgcttcttgcaatgc

SEQ ID NO: 11849 - DNA, 25 bp, Homo sapiens
ttacaccctttttcatcttgacatt

SEQ ID NO: 11850 - DNA, 25 bp, Homo sapiens
ttatcccattgaaaagaccgagcct

SEQ ID NO: 11851 - DNA, 25 bp, Homo sapiens
agacactaaatgcagacaacacctt

SEQ ID NO: 11852 - DNA, 25 bp, Homo sapiens
agagtgctggactgttccaggccct

SEQ ID NO: 11853 - DNA, 25 bp, Homo sapiens
agtgtatctccttttatctggtgcc

SEQ ID NO: 11854 - DNA, 25 bp, Homo sapiens
attacaagccctggggtttgaagct

SEQ ID NO: 11855 - DNA, 25 bp, Homo sapiens
caccctcctcttggaattacaagcc

SEQ ID NO: 11856 - DNA, 25 bp, Homo sapiens
cactggggaatgctcccagctgtgc

SEQ ID NO: 11857 - DNA, 25 bp, Homo sapiens
cctcaaacccagtctcagacactaa

SEQ ID NO: 11858 - DNA, 25 bp, Homo sapiens
gctccacgggcaggggtcagagcac

SEQ ID NO: 11859 - DNA, 25 bp, Homo sapiens
gggagcaccgtgatggagaggacag

SEQ ID NO: 11860 - DNA, 25 bp, Homo sapiens
gtcagagcactccctaatttatgtg

SEQ ID NO: 11861 - DNA, 25 bp, Homo sapiens
ttggtgtattgtcagccatcgtcct

SEQ ID NO: 11862 - DNA, 25 bp, Homo sapiens
cctggtggtgtctgtggacgacggt

SEQ ID NO: 11863 - DNA, 25 bp, Homo sapiens
ctacactgattatatcgtccccgac

SEQ ID NO: 11864 - DNA, 25 bp, Homo sapiens
gacggggtggtggtgaccatcaaca

SEQ ID NO: 11865 - DNA, 25 bp, Homo sapiens
gaggttgttttgcaccgagtgtgga

SEQ ID NO: 11866 - DNA, 25 bp, Homo sapiens
gctgctggggcaatttttccacccc

SEQ ID NO: 11867 - DNA, 25 bp, Homo sapiens
gctggacagtcatcggatgtcagcc

SEQ ID NO: 11868 - DNA, 25 bp, Homo sapiens
gctggttccttgtgtcaaagcacct

SEQ ID NO: 11869 - DNA, 25 bp, Homo sapiens
ggacgacggtggcacctttgaggtt

SEQ ID NO: 11870 - DNA, 25 bp, Homo sapiens
tcctggagggaccaagctgtgctgc

SEQ ID NO: 11871 - DNA, 25 bp, Homo sapiens
tgtcagcccggacgcacgggctgct

SEQ ID NO: 11872 - DNA, 25 bp, Homo sapiens
ttgaagtgtctgacatccacccagg

SEQ ID NO: 11873 - DNA, 25 bp, Homo sapiens
aaaggaccatgagcaactataagca

SEQ ID NO: 11874 - DNA, 25 bp, Homo sapiens
aaggtagctaccacatcattttgaa

SEQ ID NO: 11875 - DNA, 25 bp, Homo sapiens
attattctgcctttggctaattgag

SEQ ID NO: 11876 - DNA, 25 bp, Homo sapiens
cactagagaccgctcagtgctctta

SEQ ID NO: 11877 - DNA, 25 bp, Homo sapiens
cgctcagtgctcttactagatgaac

SEQ ID NO: 11878 - DNA, 25 bp, Homo sapiens
ctagatgaactcagtaacgccttga

SEQ ID NO: 11879 - DNA, 25 bp, Homo sapiens
gaatggccctactattatcatgcaa

SEQ ID NO: 11880 - DNA, 25 bp, Homo sapiens
ggggtagctcttgattttgttaaca

SEQ ID NO: 11881 - DNA, 25 bp, Homo sapiens
gtaacgccttgagctgggttgattg

SEQ ID NO: 11882 - DNA, 25 bp, Homo sapiens
tggctaattgagtaattcccctcca

SEQ ID NO: 11883 - DNA, 25 bp, Homo sapiens
ttgttggcacctcagattaatcata

SEQ ID NO: 11884 - DNA, 25 bp, Homo sapiens
caaccaattttaaccgtgtgtcaag

SEQ ID NO: 11885 - DNA, 25 bp, Homo sapiens
cagctctatcagcttattccttctc

SEQ ID NO: 11886 - DNA, 25 bp, Homo sapiens
gacagaactcaaagacagctctatc

SEQ ID NO: 11887 - DNA, 25 bp, Homo sapiens
gacggatgacctgattctaaaactt

SEQ ID NO: 11888 - DNA, 25 bp, Homo sapiens
gccagacaagactccttagaactgt

SEQ ID NO: 11889 - DNA, 25 bp, Homo sapiens
gtgcaggtttgttgtttcatgtcat

SEQ ID NO: 11890 - DNA, 25 bp, Homo sapiens
gtttcatgtcatattactcagtcta

SEQ ID NO: 11891 - DNA, 25 bp, Homo sapiens
tagaactgtcctcagatttccttcc

SEQ ID NO: 11892 - DNA, 25 bp, Homo sapiens
tattttatctagttacctttcatta

SEQ ID NO: 11893 - DNA, 25 bp, Homo sapiens
aaaatggtcgctacagcatctctcg

SEQ ID NO: 11894 - DNA, 25 bp, Homo sapiens
agctctgagcatcggatttgagacc

SEQ ID NO: 11895 - DNA, 25 bp, Homo sapiens
atttgaatataacctgccgctttgc

SEQ ID NO: 11896 - DNA, 25 bp, Homo sapiens
caagttttggtggcacgcagcctgg

SEQ ID NO: 11897 - DNA, 25 bp, Homo sapiens
ccgctttgcaggtgtattccacgtg

SEQ ID NO: 11898 - DNA, 25 bp, Homo sapiens
cttgcccacaatggcccagatggag

SEQ ID NO: 11899 - DNA, 25 bp, Homo sapiens
gctgacctctgcaaggctttcaata

SEQ ID NO: 11900 - DNA, 25 bp, Homo sapiens
tgagcctggcgcagatcgatttgaa

SEQ ID NO: 11901 - DNA, 25 bp, Homo sapiens
tttcaatagcaccttgcccacaatg

SEQ ID NO: 11902 - DNA, 25 bp, Homo sapiens
aaaaccattggaactgtgactttga

SEQ ID NO: 11903 - DNA, 25 bp, Homo sapiens
agaagcagagtgggtggtggttatg

SEQ ID NO: 11904 - DNA, 25 bp, Homo sapiens
agccaccatgattgtgttctctgcc

SEQ ID NO: 11905 - DNA, 25 bp, Homo sapiens
atatcaagtcttgactccctacttc

SEQ ID NO: 11906 - DNA, 25 bp, Homo sapiens
atgattttgacggtaagccaccatg

SEQ ID NO: 11907 - DNA, 25 bp, Homo sapiens
cttgctaagcttatatgtgcctgtt

SEQ ID NO: 11908 - DNA, 25 bp, Homo sapiens
gaaagtgcctgaaagaccttcctta

SEQ ID NO: 11909 - DNA, 25 bp, Homo sapiens
gacagaaggcattaggttgacaact

SEQ ID NO: 11910 - DNA, 25 bp, Homo sapiens
gggtggtggttatgtttgacagaag

SEQ ID NO: 11911 - DNA, 25 bp, Homo sapiens
gtgactttgaaaggtgctcttgcta

SEQ ID NO: 11912 - DNA, 25 bp, Homo sapiens
tctgcctctggttgaccttacaaaa

SEQ ID NO: 11913 - DNA, 25 bp, Homo sapiens
aaccaaaccagcactgggttctact

SEQ ID NO: 11914 - DNA, 25 bp, Homo sapiens
aactcataagtttggctgcattttg

SEQ ID NO: 11915 - DNA, 25 bp, Homo sapiens
accagcactgggttctactgctgtg

SEQ ID NO: 11916 - DNA, 25 bp, Homo sapiens
actcagtggaatagggctggttact

SEQ ID NO: 11917 - DNA, 25 bp, Homo sapiens
gctggttactttgggctgtccaact

SEQ ID NO: 11918 - DNA, 25 bp, Homo sapiens
gctgtggggtaaactaactcagtgg

SEQ ID NO: 11919 - DNA, 25 bp, Homo sapiens
gggctgtccaactcataagtttggc

SEQ ID NO: 11920 - DNA, 25 bp, Homo sapiens
gggttctactgctgtggggtaaact

SEQ ID NO: 11921 - DNA, 25 bp, Homo sapiens
gttactttgggctgtccaactcata

SEQ ID NO: 11922 - DNA, 25 bp, Homo sapiens
tacctcaaaggacccagcagctaca

SEQ ID NO: 11923 - DNA, 25 bp, Homo sapiens
tccaaagccatttacctcaaaggac

SEQ ID NO: 11924 - DNA, 25 bp, Homo sapiens
aaagtgccttatacaaccttagcct

SEQ ID NO: 11925 - DNA, 25 bp, Homo sapiens
aagccagctacagatgcatgcatat

SEQ ID NO: 11926 - DNA, 25 bp, Homo sapiens
gagatgcttctggacctgataatga

SEQ ID NO: 11927 - DNA, 25 bp, Homo sapiens
ggtcatgcctctacggatcagttaa

SEQ ID NO: 11928 - DNA, 25 bp, Homo sapiens
gtggtgcgatcaaatggtcatgcct

SEQ ID NO: 11929 - DNA, 25 bp, Homo sapiens
aagaacttctaggcacatcgtgtta

SEQ ID NO: 11930 - DNA, 25 bp, Homo sapiens
cacactacggagtcgatggttcagt

SEQ ID NO: 11931 - DNA, 25 bp, Homo sapiens
ccccgggagcggctcatagatgcaa

SEQ ID NO: 11932 - DNA, 25 bp, Homo sapiens
cgacgttctttcttctgtaggatga

SEQ ID NO: 11933 - DNA, 25 bp, Homo sapiens
gagggaagatactctttgtctcaga

SEQ ID NO: 11934 - DNA, 25 bp, Homo sapiens
gatggttcttttatcacactacgga

SEQ ID NO: 11935 - DNA, 25 bp, Homo sapiens
tcccctctacctgctcaaagaaaaa

SEQ ID NO: 11936 - DNA, 25 bp, Homo sapiens
tgggccatctcgattatgttctgga

SEQ ID NO: 11937 - DNA, 25 bp, Homo sapiens
ttatgttctggagcacgacgttctt

SEQ ID NO: 11938 - DNA, 25 bp, Homo sapiens
ttcaagatcctcaactacagccaga

SEQ ID NO: 11939 - DNA, 25 bp, Homo sapiens
tttgtttgactacctgcatcctaaa

SEQ ID NO: 11940 - DNA, 25 bp, Homo sapiens
aagtcggaactgcaactaccatcat

SEQ ID NO: 11941 - DNA, 25 bp, Homo sapiens
caataagaaccgtttctgccttggg

SEQ ID NO: 11942 - DNA, 25 bp, Homo sapiens
cctactactgtttgcaagatcccta

SEQ ID NO: 11943 - DNA, 25 bp, Homo sapiens
gaataccaccgccaggatgttacta

SEQ ID NO: 11944 - DNA, 25 bp, Homo sapiens
gcacagtctgtgaaccatggatttg

SEQ ID NO: 11945 - DNA, 25 bp, Homo sapiens
ggattgagatacatctgcacggccc

SEQ ID NO: 11946 - DNA, 25 bp, Homo sapiens
ggtgtatgccgaatgccttagtgac

SEQ ID NO: 11947 - DNA, 25 bp, Homo sapiens
gttcttactcaaatgggttcacctc

SEQ ID NO: 11948 - DNA, 25 bp, Homo sapiens
tcgtgtgggtgaagcgttccatgcc

SEQ ID NO: 11949 - DNA, 25 bp, Homo sapiens
tgcctcctccacaagtgtgttggtg

SEQ ID NO: 11950 - DNA, 25 bp, Homo sapiens
tggatggtttcactgatccttccaa

SEQ ID NO: 11951 - DNA, 25 bp, Homo sapiens
aggcctatgggggctctggaaggat

SEQ ID NO: 11952 - DNA, 25 bp, Homo sapiens
atttcaacaatctctatggcaccaa

SEQ ID NO: 11953 - DNA, 25 bp, Homo sapiens
cagccccagacttggaaatctggca

SEQ ID NO: 11954 - DNA, 25 bp, Homo sapiens
ccggccattctacgtcaacaaaggc

SEQ ID NO: 11955 - DNA, 25 bp, Homo sapiens
gaaatctggcaagcagactatgctg

SEQ ID NO: 11956 - DNA, 25 bp, Homo sapiens
gagcagcacagtggggacatctccc

SEQ ID NO: 11957 - DNA, 25 bp, Homo sapiens
gaggagacaaaaccaggagcagcac

SEQ ID NO: 11958 - DNA, 25 bp, Homo sapiens
gcaacgggattgggtccaacgaagc

SEQ ID NO: 11959 - DNA, 25 bp, Homo sapiens
gcaccaaaggtaactacacctcccg

SEQ ID NO: 11960 - DNA, 25 bp, Homo sapiens
tacacctcccgggtctgggagtact

SEQ ID NO: 11961 - DNA, 25 bp, Homo sapiens
tggaaggatgggccagcttgcaggg

SEQ ID NO: 11962 - DNA, 25 bp, Homo sapiens
aagagtcttcaacataacccacttg

SEQ ID NO: 11963 - DNA, 25 bp, Homo sapiens
actgacacaaaggaagtgccccctc

SEQ ID NO: 11964 - DNA, 25 bp, Homo sapiens
cataacccacttgtcactgacacaa

SEQ ID NO: 11965 - DNA, 25 bp, Homo sapiens
ctgccagcaaagaggactcgcttgt

SEQ ID NO: 11966 - DNA, 25 bp, Homo sapiens
gactctaaagaccaaacttcactct

SEQ ID NO: 11967 - DNA, 25 bp, Homo sapiens
gcggggcacagattggagagggctc

SEQ ID NO: 11968 - DNA, 25 bp, Homo sapiens
gcgtcagtctttttctgttgtaact

SEQ ID NO: 11969 - DNA, 25 bp, Homo sapiens
gtgattcaaatgggttttccacgct

SEQ ID NO: 11970 - DNA, 25 bp, Homo sapiens
gtttggtatttgcggcgtcagtctt

SEQ ID NO: 11971 - DNA, 25 bp, Homo sapiens
ttggagagggctctgtgctgacatg

SEQ ID NO: 11972 - DNA, 25 bp, Homo sapiens
tttccacgctagggcggggcacaga

SEQ ID NO: 11973 - DNA, 25 bp, Homo sapiens
agcccttcaagtacacgacggtgac

SEQ ID NO: 11974 - DNA, 25 bp, Homo sapiens
caagacccgggagaaccagcaggac

SEQ ID NO: 11975 - DNA, 25 bp, Homo sapiens
cagacaactttaaactcgtccccag

SEQ ID NO: 11976 - DNA, 25 bp, Homo sapiens
gacgtgcatttcatgaagcgctacc

SEQ ID NO: 11977 - DNA, 25 bp, Homo sapiens
gcagccggagcttcagaagcccttc

SEQ ID NO: 11978 - DNA, 25 bp, Homo sapiens
gtgaccaagaggtcccgtcggatcc

SEQ ID NO: 11979 - DNA, 25 bp, Homo sapiens
taagtactccggctggtacgtgggc

SEQ ID NO: 11980 - DNA, 25 bp, Homo sapiens
tacacggccctgatgtcggctaagt

SEQ ID NO: 11981 - DNA, 25 bp, Homo sapiens
tagtcaacccacaggtgcttgtctc

SEQ ID NO: 11982 - DNA, 25 bp, Homo sapiens
tattgttgacttgaaacccccgatg

SEQ ID NO: 11983 - DNA, 25 bp, Homo sapiens
tgcttgtctctctctaggaacagac

SEQ ID NO: 11984 - DNA, 25 bp, Homo sapiens
acgctggctgctcaagtactagccc

SEQ ID NO: 11985 - DNA, 25 bp, Homo sapiens
atccccgcccggatgaagagggctg

SEQ ID NO: 11986 - DNA, 25 bp, Homo sapiens
attcatgggctgcggaggactgggc

SEQ ID NO: 11987 - DNA, 25 bp, Homo sapiens
ccagtcaaaaacgcccggatctcag

SEQ ID NO: 11988 - DNA, 25 bp, Homo sapiens
cccacaaagccgctgccattttatt

SEQ ID NO: 11989 - DNA, 25 bp, Homo sapiens
cccctggctacgccaaagtcatcaa

SEQ ID NO: 11990 - DNA, 25 bp, Homo sapiens
gatggtgactactggagactgctgc

SEQ ID NO: 11991 - DNA, 25 bp, Homo sapiens
gccgacgggagtaagccctggtggt

SEQ ID NO: 11992 - DNA, 25 bp, Homo sapiens
gctctttgggggaggccacggagcc

SEQ ID NO: 11993 - DNA, 25 bp, Homo sapiens
ggatctcagtcaaaggcattcgcca

SEQ ID NO: 11994 - DNA, 25 bp, Homo sapiens
tcatcaagaaagtcatcatccccgc

SEQ ID NO: 11995 - DNA, 25 bp, Homo sapiens
aaatacattcattgtcttcagtcat

SEQ ID NO: 11996 - DNA, 25 bp, Homo sapiens
aaggcaccctgttctgttatggttt

SEQ ID NO: 11997 - DNA, 25 bp, Homo sapiens
ataccaagtatattgtgtctgccat

SEQ ID NO: 11998 - DNA, 25 bp, Homo sapiens
catagaacagttccttatccttggc

SEQ ID NO: 11999 - DNA, 25 bp, Homo sapiens
ccaggtattatatttgtcacaggcc

SEQ ID NO: 12000 - DNA, 25 bp, Homo sapiens
gcagtgcatctgcatagaacagttc

SEQ ID NO: 12001 - DNA, 25 bp, Homo sapiens
ggagagtgttaatcttttctgtgac

SEQ ID NO: 12002 - DNA, 25 bp, Homo sapiens
tcattgtcttcagtcatacagcaag

SEQ ID NO: 12003 - DNA, 25 bp, Homo sapiens
ttattataactcagcccatacatat

SEQ ID NO: 12004 - DNA, 25 bp, Homo sapiens
tttgtcacaggccattgtaaatacc

SEQ ID NO: 12005 - DNA, 25 bp, Homo sapiens
tttgtttccttgtaaaggcaccctg

SEQ ID NO: 12006 - DNA, 25 bp, Homo sapiens
aacggcataagtcctattttagcct

SEQ ID NO: 12007 - DNA, 25 bp, Homo sapiens
aatcttaacatgcattcctactatt

SEQ ID NO: 12008 - DNA, 25 bp, Homo sapiens
acaactttgctcctaactgtgggtt

SEQ ID NO: 12009 - DNA, 25 bp, Homo sapiens
acacctactcactttacaactttgc

SEQ ID NO: 12010 - DNA, 25 bp, Homo sapiens
atattctgactcgacatcttgtccc

SEQ ID NO: 12011 - DNA, 25 bp, Homo sapiens
caaaagagtgtcccttcttcacacc

SEQ ID NO: 12012 - DNA, 25 bp, Homo sapiens
gatttgtgctaccatttactcgttt

SEQ ID NO: 12013 - DNA, 25 bp, Homo sapiens
gccttacctcctgcatttgcaatac

SEQ ID NO: 12014 - DNA, 25 bp, Homo sapiens
tcagtgggcacagttcttcagctac

SEQ ID NO: 12015 - DNA, 25 bp, Homo sapiens
ttgatcctgctcttatattcttttt

SEQ ID NO: 12016 - DNA, 25 bp, Homo sapiens
ttgtccccaatccttccaaaaatat

SEQ ID NO: 12017 - DNA, 25 bp, Homo sapiens
accgtgaagacgtgtggccgcgtcc

SEQ ID NO: 12018 - DNA, 25 bp, Homo sapiens
agaaacaacctgaaggccatcccgt

SEQ ID NO: 12019 - DNA, 25 bp, Homo sapiens
agccctgcgttgtgtgttttcagat

SEQ ID NO: 12020 - DNA, 25 bp, Homo sapiens
cacccggcactgtaggagtcacgtg

SEQ ID NO: 12021 - DNA, 25 bp, Homo sapiens
cacggttgacctgaactcgtgcctt

SEQ ID NO: 12022 - DNA, 25 bp, Homo sapiens
cagcctttctcaggggactgtcatt

SEQ ID NO: 12023 - DNA, 25 bp, Homo sapiens
cccgcagaaggaacggcctgtaccg

SEQ ID NO: 12024 - DNA, 25 bp, Homo sapiens
ggctccggctgtgaagtcactgaac

SEQ ID NO: 12025 - DNA, 25 bp, Homo sapiens
gtctgtgtcagctgtctttgtagtt

SEQ ID NO: 12026 - DNA, 25 bp, Homo sapiens
tactcgcagcgatctattgttccat

SEQ ID NO: 12027 - DNA, 25 bp, Homo sapiens
tctcttgtgtctcactcacggaaag

SEQ ID NO: 12028 - DNA, 25 bp, Homo sapiens
gaatagccatggcgatctccagcac

SEQ ID NO: 12029 - DNA, 25 bp, Homo sapiens
tcacctgctgtctgcttggaagaac

SEQ ID NO: 12030 - DNA, 25 bp, Homo sapiens
attcccttatccaggctttttgaca

SEQ ID NO: 12031 - DNA, 25 bp, Homo sapiens
ctggcctttgacacctaccaggagt

SEQ ID NO: 12032 - DNA, 25 bp, Homo sapiens
gaagtattcattcctgcagaacccc

SEQ ID NO: 12033 - DNA, 25 bp, Homo sapiens
gacaaggtcgagacattcctgcgca

SEQ ID NO: 12034 - DNA, 25 bp, Homo sapiens
gacgcactactcaagaactacgggc

SEQ ID NO: 12035 - DNA, 25 bp, Homo sapiens
gcagacctacagcaagttcgacaca

SEQ ID NO: 12036 - DNA, 25 bp, Homo sapiens
gctgctctactgcttcaggaaggac

SEQ ID NO: 12037 - DNA, 25 bp, Homo sapiens
gctttttgacaacgctatgctccgc

SEQ ID NO: 12038 - DNA, 25 bp, Homo sapiens
gggcagatcttcaagcagacctaca

SEQ ID NO: 12039 - DNA, 25 bp, Homo sapiens
gtttctcagagtctattccgacacc

SEQ ID NO: 12040 - DNA, 25 bp, Homo sapiens
ttcaagagggcagtgccttcccaac

SEQ ID NO: 12041 - DNA, 25 bp, Homo sapiens
acaagatgatccgcaatcccaacag

SEQ ID NO: 12042 - DNA, 25 bp, Homo sapiens
agttcggccaaattgtcaacacgct

SEQ ID NO: 12043 - DNA, 25 bp, Homo sapiens
ccaacagcctcaaagccatggcgcc

SEQ ID NO: 12044 - DNA, 25 bp, Homo sapiens
cccgactacaccagctttaacacgg

SEQ ID NO: 12045 - DNA, 25 bp, Homo sapiens
ctcctttgacgtcgtgtctcagatg

SEQ ID NO: 12046 - DNA, 25 bp, Homo sapiens
ctgcaccaactcatgctggactgtt

SEQ ID NO: 12047 - DNA, 25 bp, Homo sapiens
gccacgggcacgggaagaaccaagc

SEQ ID NO: 12048 - DNA, 25 bp, Homo sapiens
gtatccaggtgatgcgggcgcagat

SEQ ID NO: 12049 - DNA, 25 bp, Homo sapiens
gtcactttggctggccaccagaaaa

SEQ ID NO: 12050 - DNA, 25 bp, Homo sapiens
tacaaggagagcttcgccaatgccg

SEQ ID NO: 12051 - DNA, 25 bp, Homo sapiens
tggaggtttgacattcacctgcctc

SEQ ID NO: 12052 - DNA, 25 bp, Homo sapiens
atcacagacactttgatccacctga

SEQ ID NO: 12053 - DNA, 25 bp, Homo sapiens
atctcggttccgcatgatgaatctg

SEQ ID NO: 12054 - DNA, 25 bp, Homo sapiens
atggtggagatcttcgacatgctgc

SEQ ID NO: 12055 - DNA, 25 bp, Homo sapiens
ccactagccgtggaggggcatccgt

SEQ ID NO: 12056 - DNA, 25 bp, Homo sapiens
ccatatccaccgagtcctggacaag

SEQ ID NO: 12057 - DNA, 25 bp, Homo sapiens
ctctcccacatcaggcacatgagta

SEQ ID NO: 12058 - DNA, 25 bp, Homo sapiens
gaagtgcaagaacgtggtgcccctc

SEQ ID NO: 12059 - DNA, 25 bp, Homo sapiens
ggaggagacggaccaaagccacttg

SEQ ID NO: 12060 - DNA, 25 bp, Homo sapiens
gtattacatcacgggggaggcagag

SEQ ID NO: 12061 - DNA, 25 bp, Homo sapiens
tctacttcatcgcattccttgcaaa

SEQ ID NO: 12062 - DNA, 25 bp, Homo sapiens
ttgatccacctgatggccaaggcag

SEQ ID NO: 12063 - DNA, 25 bp, Homo sapiens
aatgctgcacagaatccttggtgaa

SEQ ID NO: 12064 - DNA, 25 bp, Homo sapiens
cgaccatgcttttcagctctggaag

SEQ ID NO: 12065 - DNA, 25 bp, Homo sapiens
gaagactatctatccgtggtcctga

SEQ ID NO: 12066 - DNA, 25 bp, Homo sapiens
gaagtcgatgaaacatacgttccca

SEQ ID NO: 12067 - DNA, 25 bp, Homo sapiens
gaatccttggtgaacaggcgaccat

SEQ ID NO: 12068 - DNA, 25 bp, Homo sapiens
gatatatgcacactttctgagaagg

SEQ ID NO: 12069 - DNA, 25 bp, Homo sapiens
gtcctgaaccagttatgtgtgttgc

SEQ ID NO: 12070 - DNA, 25 bp, Homo sapiens
gtgacagagtcaccaaatgctgcac

SEQ ID NO: 12071 - DNA, 25 bp, Homo sapiens
gtgtgttgcatgagaaaacgccagt

SEQ ID NO: 12072 - DNA, 25 bp, Homo sapiens
tacgttcccaaagagtttaatgctg

SEQ ID NO: 12073 - DNA, 25 bp, Homo sapiens
tgctgaaacattcaccttccatgca

SEQ ID NO: 12074 - DNA, 25 bp, Homo sapiens
aagggttagtttacaatcagccaca

SEQ ID NO: 12075 - DNA, 25 bp, Homo sapiens
cacccaggacttccatttgctttgt

SEQ ID NO: 12076 - DNA, 25 bp, Homo sapiens
cggggctccactgaacaagttggcc

SEQ ID NO: 12077 - DNA, 25 bp, Homo sapiens
cttgcttgcaataggtgtgcgtcag

SEQ ID NO: 12078 - DNA, 25 bp, Homo sapiens
cttggaactcaaggatgcccaggct

SEQ ID NO: 12079 - DNA, 25 bp, Homo sapiens
gaacaagttggcctgcactggtgtt

SEQ ID NO: 12080 - DNA, 25 bp, Homo sapiens
gagcgcttcgagatgttccgagagc

SEQ ID NO: 12081 - DNA, 25 bp, Homo sapiens
gcctgcactggtgttttgttgtggg

SEQ ID NO: 12082 - DNA, 25 bp, Homo sapiens
gtaggacataccagcttagatttta

SEQ ID NO: 12083 - DNA, 25 bp, Homo sapiens
tacaatcagccacattctaggtagg

SEQ ID NO: 12084 - DNA, 25 bp, Homo sapiens
ttgggtctttgaacccttgcttgca

SEQ ID NO: 12085 - DNA, 25 bp, Homo sapiens
acccttccaaggcctggggagatgt

SEQ ID NO: 12086 - DNA, 25 bp, Homo sapiens
gaaattgcttccaagttcagcgaga

SEQ ID NO: 12087 - DNA, 25 bp, Homo sapiens
gacagatttctgttgcagccttcac

SEQ ID NO: 12088 - DNA, 25 bp, Homo sapiens
gttaccagacagacctttttatagg

SEQ ID NO: 12089 - DNA, 25 bp, Homo sapiens
tagagactctgtattgaatttgtgt

SEQ ID NO: 12090 - DNA, 25 bp, Homo sapiens
aatcctggaaattcgacacaattag

SEQ ID NO: 12091 - DNA, 25 bp, Homo sapiens
acagtcttagcagtggtaggttggg

SEQ ID NO: 12092 - DNA, 25 bp, Homo sapiens
gaaacacctcattagctgagtgtag

SEQ ID NO: 12093 - DNA, 25 bp, Homo sapiens
gagtgtagagaagtgcatcttatga

SEQ ID NO: 12094 - DNA, 25 bp, Homo sapiens
gcagtggtaggttgggaaggagata

SEQ ID NO: 12095 - DNA, 25 bp, Homo sapiens
gggaaggagatagctgcaaccaaaa

SEQ ID NO: 12096 - DNA, 25 bp, Homo sapiens
gtgcatcttatgaaacagtcttagc

SEQ ID NO: 12097 - DNA, 25 bp, Homo sapiens
gtgcttctagtaggagggctgaaag

SEQ ID NO: 12098 - DNA, 25 bp, Homo sapiens
taaaacaatatcggctcctcatcca

SEQ ID NO: 12099 - DNA, 25 bp, Homo sapiens
tccagaatacccacccaagaaaata

SEQ ID NO: 12100 - DNA, 25 bp, Homo sapiens
tccagtgcttctagtaggagggctg

SEQ ID NO: 12101 - DNA, 25 bp, Homo sapiens
aaaactagtgtcttcaaatcctcac

SEQ ID NO: 12102 - DNA, 25 bp, Homo sapiens
aatctctggcttacaagtccttaat

SEQ ID NO: 12103 - DNA, 25 bp, Homo sapiens
aatttgcatttccataatatctaat

SEQ ID NO: 12104 - DNA, 25 bp, Homo sapiens
agttagctttgtaagaaacagtcaa

SEQ ID NO: 12105 - DNA, 25 bp, Homo sapiens
attggccatttgtttgactttgttt

SEQ ID NO: 12106 - DNA, 25 bp, Homo sapiens
gagttcttaataatctctggcttac

SEQ ID NO: 12107 - DNA, 25 bp, Homo sapiens
gattatagccatttttgtaggtaca

SEQ ID NO: 12108 - DNA, 25 bp, Homo sapiens
ggcttacaagtccttaatttatcaa

SEQ ID NO: 12109 - DNA, 25 bp, Homo sapiens
taatttgggttgtctgtcttgtctt

SEQ ID NO: 12110 - DNA, 25 bp, Homo sapiens
ttatattcccaccaggaatgtttaa

SEQ ID NO: 12111 - DNA, 25 bp, Homo sapiens
ttgtttgactttgtttggtgaaatg

SEQ ID NO: 12112 - DNA, 25 bp, Homo sapiens
aatgggcagccggagaacaactaca

SEQ ID NO: 12113 - DNA, 25 bp, Homo sapiens
agcaagctcaccgtggacaagagca

SEQ ID NO: 12114 - DNA, 25 bp, Homo sapiens
cagcacgtaccgtgtggtcagcgtc

SEQ ID NO: 12115 - DNA, 25 bp, Homo sapiens
ccaaagggcagccccgagaaccaca

SEQ ID NO: 12116 - DNA, 25 bp, Homo sapiens
gagaacaactacaagaccacgcctc

SEQ ID NO: 12117 - DNA, 25 bp, Homo sapiens
gagaaccacaggtgtacaccctgcc

SEQ ID NO: 12118 - DNA, 25 bp, Homo sapiens
gcagcaggggaacgtcttctcatgc

SEQ ID NO: 12119 - DNA, 25 bp, Homo sapiens
gcctggtcaaaggcttctatcccag

SEQ ID NO: 12120 - DNA, 25 bp, Homo sapiens
gtcttctcatgctccgtgatgcatg

SEQ ID NO: 12121 - DNA, 25 bp, Homo sapiens
tgcacaaccactacacgcagaagag

SEQ ID NO: 12122 - DNA, 25 bp, Homo sapiens
tggtcaaaggcttctatcccagcga

SEQ ID NO: 12123 - DNA, 25 bp, Homo sapiens
aactgcagggttacaccaaaatcta

SEQ ID NO: 12124 - DNA, 25 bp, Homo sapiens
aatctagctgatttaacttgtattt

SEQ ID NO: 12125 - DNA, 25 bp, Homo sapiens
aatgcctagcagagaactgccttaa

SEQ ID NO: 12126 - DNA, 25 bp, Homo sapiens
aatttagctaggcatggcggcgcat

SEQ ID NO: 12127 - DNA, 25 bp, Homo sapiens
aggcatggcggcgcatgcctgcaat

SEQ ID NO: 12128 - DNA, 25 bp, Homo sapiens
gatttaacttgtattttgtcacttt

SEQ ID NO: 12129 - DNA, 25 bp, Homo sapiens
gcctgaccaacatggcagaagcccc

SEQ ID NO: 12130 - DNA, 25 bp, Homo sapiens
gttggccatggtgaaagggtttgat

SEQ ID NO: 12131 - DNA, 25 bp, Homo sapiens
tggaggctgcggtgagccgagcatt

SEQ ID NO: 12132 - DNA, 25 bp, Homo sapiens
tgtctttctcttccttttatataaa

SEQ ID NO: 12133 - DNA, 25 bp, Homo sapiens
aacccacacgtgcacgtcattggag

SEQ ID NO: 12134 - DNA, 25 bp, Homo sapiens
atggagtcaaggagcctcaaaccac

SEQ ID NO: 12135 - DNA, 25 bp, Homo sapiens
cagagttggtgtttggagcccgact

SEQ ID NO: 12136 - DNA, 25 bp, Homo sapiens
ccaccgtcatccataacccagtgga

SEQ ID NO: 12137 - DNA, 25 bp, Homo sapiens
gaccacggagcagctcatcgaggcc

SEQ ID NO: 12138 - DNA, 25 bp, Homo sapiens
gccaagaacagcaagccgatccaca

SEQ ID NO: 12139 - DNA, 25 bp, Homo sapiens
gctcacgcagtacattgacgggcag

SEQ ID NO: 12140 - DNA, 25 bp, Homo sapiens
gtcattggagaggatgccgcctgca

SEQ ID NO: 12141 - DNA, 25 bp, Homo sapiens
gtcttctgacagtgccaataccacc

SEQ ID NO: 12142 - DNA, 25 bp, Homo sapiens
tgactttgaggcctacgcattctac

SEQ ID NO: 12143 - DNA, 25 bp, Homo sapiens
tggccccgctgcagtgaagagctgc

SEQ ID NO: 12144 - DNA, 25 bp, Homo sapiens
aggtgagcagtaggtcatccagtcc

SEQ ID NO: 12145 - DNA, 25 bp, Homo sapiens
caactcgaagtcatccatggacccc

SEQ ID NO: 12146 - DNA, 25 bp, Homo sapiens
cacagcctattccaagcctaaacgg

SEQ ID NO: 12147 - DNA, 25 bp, Homo sapiens
cagccaagacgtagatccatccaag

SEQ ID NO: 12148 - DNA, 25 bp, Homo sapiens
ccatcccaatggcttatcttacact

SEQ ID NO: 12149 - DNA, 25 bp, Homo sapiens
cctttctacttactaccagcaatgc

SEQ ID NO: 12150 - DNA, 25 bp, Homo sapiens
gcaaaatacatctcgcctggtacag

SEQ ID NO: 12151 - DNA, 25 bp, Homo sapiens
ggacccctgatgattccacagatac

SEQ ID NO: 12152 - DNA, 25 bp, Homo sapiens
gggagcagtgtggagagcttgcccc

SEQ ID NO: 12153 - DNA, 25 bp, Homo sapiens
tctggatgtccctgagatcgtcata

SEQ ID NO: 12154 - DNA, 25 bp, Homo sapiens
tgattactacctcaggaccaacctc

SEQ ID NO: 12155 - DNA, 25 bp, Homo sapiens
caaaagcctttctacttactaccag

SEQ ID NO: 12156 - DNA, 25 bp, Homo sapiens
gacaaggcacttcatgattctctgg

SEQ ID NO: 12157 - DNA, 25 bp, Homo sapiens
gaccaacctcagaaaagccaactcg

SEQ ID NO: 12158 - DNA, 25 bp, Homo sapiens
gattctctgggaccgttacattttg

SEQ ID NO: 12159 - DNA, 25 bp, Homo sapiens
gaaggagccccacaggaaggaattc

SEQ ID NO: 12160 - DNA, 25 bp, Homo sapiens
gaggcttatgaaatgccttctgagg

SEQ ID NO: 12161 - DNA, 25 bp, Homo sapiens
gagggtgttctctatgtagtggctg

SEQ ID NO: 12162 - DNA, 25 bp, Homo sapiens
gatatgcctgtggatcctgacaatg

SEQ ID NO: 12163 - DNA, 25 bp, Homo sapiens
atacacctgctttgggtaaaactct

SEQ ID NO: 12164 - DNA, 25 bp, Homo sapiens
cagtaaatgatgtcggtttgcccag

SEQ ID NO: 12165 - DNA, 25 bp, Homo sapiens
gcttgaagccaaatctttccatgtg

SEQ ID NO: 12166 - DNA, 25 bp, Homo sapiens
gctttttttgttgtcagctatctta

SEQ ID NO: 12167 - DNA, 25 bp, Homo sapiens
ttaataactctggtctagattttca

SEQ ID NO: 12168 - DNA, 25 bp, Homo sapiens
tttgcccagtatcacttatcttctg

SEQ ID NO: 12169 - DNA, 25 bp, Homo sapiens
agaagactctgttcatccagtgcga

SEQ ID NO: 12170 - DNA, 25 bp, Homo sapiens
cctttgcagaggcgctgctgcttaa

SEQ ID NO: 12171 - DNA, 25 bp, Homo sapiens
cgtgaacggcaaagtggcgctggtg

SEQ ID NO: 12172 - DNA, 25 bp, Homo sapiens
gactatgatacaactccatttcaag

SEQ ID NO: 12173 - DNA, 25 bp, Homo sapiens
gcgcggctcagggcataggcagagc

SEQ ID NO: 12174 - DNA, 25 bp, Homo sapiens
ggaggtgaaggcggcatcattatca

SEQ ID NO: 12175 - DNA, 25 bp, Homo sapiens
ggctgaccagcaacaactgagagac

SEQ ID NO: 12176 - DNA, 25 bp, Homo sapiens
gggcgccaaggtagcgctggtggat

SEQ ID NO: 12177 - DNA, 25 bp, Homo sapiens
gtagaccactttggaagactggaca

SEQ ID NO: 12178 - DNA, 25 bp, Homo sapiens
tccagtgcgatgtggctgaccagca

SEQ ID NO: 12179 - DNA, 25 bp, Homo sapiens
tgctgcttaagggcgccaaggtagc

SEQ ID NO: 12180 - DNA, 25 bp, Homo sapiens
atctatgctcatcagggatagtggt

SEQ ID NO: 12181 - DNA, 25 bp, Homo sapiens
gggaagatttcctcaattgtttgtt

SEQ ID NO: 12182 - DNA, 25 bp, Homo sapiens
gggatagtggtctgcagttttcttt

SEQ ID NO: 12183 - DNA, 25 bp, Homo sapiens
ggtttggccttttcacataatctca

SEQ ID NO: 12184 - DNA, 25 bp, Homo sapiens
gtgcagttttatttagttagctagt

SEQ ID NO: 12185 - DNA, 25 bp, Homo sapiens
tatactatcttcttgatgtgcagtt

SEQ ID NO: 12186 - DNA, 25 bp, Homo sapiens
tccaaacttgtagccttgtcttctc

SEQ ID NO: 12187 - DNA, 25 bp, Homo sapiens
tcttctccctcaggaatgccaatca

SEQ ID NO: 12188 - DNA, 25 bp, Homo sapiens
tgttgaggacttttgcatctatgct

SEQ ID NO: 12189 - DNA, 25 bp, Homo sapiens
ttagagactttgtccacttcttttg

SEQ ID NO: 12190 - DNA, 25 bp, Homo sapiens
tttcacataatctcatatttcttag

SEQ ID NO: 12191 - DNA, 25 bp, Homo sapiens
aagctatgtgtatcttctgtgtaaa

SEQ ID NO: 12192 - DNA, 25 bp, Homo sapiens
aatggtgtggctagcatttcccttt

SEQ ID NO: 12193 - DNA, 25 bp, Homo sapiens
acttccttggaatatagctgcatta

SEQ ID NO: 12194 - DNA, 25 bp, Homo sapiens
agtcactttccttatgtatcatcta

SEQ ID NO: 12195 - DNA, 25 bp, Homo sapiens
cttccctaagtcactttccttatgt

SEQ ID NO: 12196 - DNA, 25 bp, Homo sapiens
gaagcctgttgggccagaagacaga

SEQ ID NO: 12197 - DNA, 25 bp, Homo sapiens
gaagggaacacatttccttctgaac

SEQ ID NO: 12198 - DNA, 25 bp, Homo sapiens
gcaatccaggcctctgttgaaaaga

SEQ ID NO: 12199 - DNA, 25 bp, Homo sapiens
taagtttgcttttgaccatcacctc

SEQ ID NO: 12200 - DNA, 25 bp, Homo sapiens
taatccatttagcaatccaggcctc

SEQ ID NO: 12201 - DNA, 25 bp, Homo sapiens
tcacctcccagtagcaatttgcttt

SEQ ID NO: 12202 - DNA, 25 bp, Homo sapiens
acgcccccaaatccttgagatgtgg

SEQ ID NO: 12203 - DNA, 25 bp, Homo sapiens
agatggtggtgtggcagcgggagtg

SEQ ID NO: 12204 - DNA, 25 bp, Homo sapiens
agtggcagtcctggacaacccatac

SEQ ID NO: 12205 - DNA, 25 bp, Homo sapiens
catttcagagctgggcatctttggg

SEQ ID NO: 12206 - DNA, 25 bp, Homo sapiens
ccgagtggtccagtgcatttcagag

SEQ ID NO: 12207 - DNA, 25 bp, Homo sapiens
gaaccaaagccatcgagcatgcaga

SEQ ID NO: 12208 - DNA, 25 bp, Homo sapiens
gaagatcgaacctgagccttttgag

SEQ ID NO: 12209 - DNA, 25 bp, Homo sapiens
gccttttgagaattgcctgctacgg

SEQ ID NO: 12210 - DNA, 25 bp, Homo sapiens
ggggcatctacttcgaaccaaagcc

SEQ ID NO: 12211 - DNA, 25 bp, Homo sapiens
tctcctagccctcctgaggggtatc

SEQ ID NO: 12212 - DNA, 25 bp, Homo sapiens
ttagatgagatctagacgcccccaa

SEQ ID NO: 12213 - DNA, 25 bp, Homo sapiens
caacttcaaccacaggctgctggag

SEQ ID NO: 12214 - DNA, 25 bp, Homo sapiens
caggattggccaagtccatcggggt

SEQ ID NO: 12215 - DNA, 25 bp, Homo sapiens
gagggtgttgcacgacatctagcag

SEQ ID NO: 12216 - DNA, 25 bp, Homo sapiens
gatgatcctcaacaagccagggctc

SEQ ID NO: 12217 - DNA, 25 bp, Homo sapiens
gtggaatgtcatccttacttcaacc

SEQ ID NO: 12218 - DNA, 25 bp, Homo sapiens
tcaagtacaagcctgtctgcaacca

SEQ ID NO: 12219 - DNA, 25 bp, Homo sapiens
attccagtctacttgagttagcata

SEQ ID NO: 12220 - DNA, 25 bp, Homo sapiens
ctgtttccttgttccaatttgacaa

SEQ ID NO: 12221 - DNA, 25 bp, Homo sapiens
gagtggtgctgctttaattcataaa

SEQ ID NO: 12222 - DNA, 25 bp, Homo sapiens
ggggagctatcactgtacttgtaga

SEQ ID NO: 12223 - DNA, 25 bp, Homo sapiens
gtacttgtagagtggtgctgcttta

SEQ ID NO: 12224 - DNA, 25 bp, Homo sapiens
gttagcataatacagaagtcccctc

SEQ ID NO: 12225 - DNA, 25 bp, Homo sapiens
gttccaatttgacaaaacccactgt

SEQ ID NO: 12226 - DNA, 25 bp, Homo sapiens
gttcttgtattgtattgcccagggg

SEQ ID NO: 12227 - DNA, 25 bp, Homo sapiens
taacctgaactaatctgatgttaac

SEQ ID NO: 12228 - DNA, 25 bp, Homo sapiens
taatacagaagtcccctctacttta

SEQ ID NO: 12229 - DNA, 25 bp, Homo sapiens
tgcccagggggagctatcactgtac

SEQ ID NO: 12230 - DNA, 25 bp, Homo sapiens
ctgacctcgagccttatttgtgaag

SEQ ID NO: 12231 - DNA, 25 bp, Homo sapiens
gaaatgggacgtcttccttaacatc

SEQ ID NO: 12232 - DNA, 25 bp, Homo sapiens
gaccactcggatggcactcaggtgg

SEQ ID NO: 12233 - DNA, 25 bp, Homo sapiens
gcagggggagacttggcacctgacc

SEQ ID NO: 12234 - DNA, 25 bp, Homo sapiens
ggtctgctgcagaaacactgtcggc

SEQ ID NO: 12235 - DNA, 25 bp, Homo sapiens
tggctgcggagaagctgggcaccat

SEQ ID NO: 12236 - DNA, 25 bp, Homo sapiens
acggctaatccacatggtcttcgtc

SEQ ID NO: 12237 - DNA, 25 bp, Homo sapiens
aggggatacaagctggggttctggc

SEQ ID NO: 12238 - DNA, 25 bp, Homo sapiens
atcacaccagccatgatctgtgccg

SEQ ID NO: 12239 - DNA, 25 bp, Homo sapiens
cagaagtgctgaacgctgccaaggt

SEQ ID NO: 12240 - DNA, 25 bp, Homo sapiens
cctctgactttcaacgacctagtga

SEQ ID NO: 12241 - DNA, 25 bp, Homo sapiens
ctgccaaggtgcttctcattgagac

SEQ ID NO: 12242 - DNA, 25 bp, Homo sapiens
gaacgtcgattcttgccagggtgac

SEQ ID NO: 12243 - DNA, 25 bp, Homo sapiens
gattcagaggtcacttcatttttat

SEQ ID NO: 12244 - DNA, 25 bp, Homo sapiens
tcttcgtccttgacgtcgttttaca

SEQ ID NO: 12245 - DNA, 25 bp, Homo sapiens
tgaagctgcagaagcctctgacttt

SEQ ID NO: 12246 - DNA, 25 bp, Homo sapiens
tgtctatgacaacctgatcacacca

SEQ ID NO: 12247 - DNA, 25 bp, Homo sapiens
aaaggttgtgtagctgtgtcatgta

SEQ ID NO: 12248 - DNA, 25 bp, Homo sapiens
gacacttgttgtccagttgaaaaaa

SEQ ID NO: 12249 - DNA, 25 bp, Homo sapiens
ggacattgtgtcagattaccagtta

SEQ ID NO: 12250 - DNA, 25 bp, Homo sapiens
gtagctgtgtcatgtatataccttt

SEQ ID NO: 12251 - DNA, 25 bp, Homo sapiens
gtgtcagattaccagttataggaac

SEQ ID NO: 12252 - DNA, 25 bp, Homo sapiens
gttataggaacaattctcttttcct

SEQ ID NO: 12253 - DNA, 25 bp, Homo sapiens
gttttgacacttgttgtccagttga

SEQ ID NO: 12254 - DNA, 25 bp, Homo sapiens
tacatccacagggttttgacacttg

SEQ ID NO: 12255 - DNA, 25 bp, Homo sapiens
tcttgttttaccctatacatccaca

SEQ ID NO: 12256 - DNA, 25 bp, Homo sapiens
tcttttcctgaccaatcttgtttta

SEQ ID NO: 12257 - DNA, 25 bp, Homo sapiens
tgtatatacctttttgtgtcaaaag

SEQ ID NO: 12258 - DNA, 25 bp, Homo sapiens
gaagaagagcggtttggcttccctg

SEQ ID NO: 12259 - DNA, 25 bp, Homo sapiens
tgcactgcctggggcttgcagaaga

SEQ ID NO: 12260 - DNA, 25 bp, Homo sapiens
ttcacagctggcccgttggaagaag

SEQ ID NO: 12261 - DNA, 25 bp, Homo sapiens
cagaggggcgagatgcaggctcagc

SEQ ID NO: 12262 - DNA, 25 bp, Homo sapiens
ccagatggaatgctctctgcaggcc

SEQ ID NO: 12263 - DNA, 25 bp, Homo sapiens
aacgtggtgcggctattgcggtaat

SEQ ID NO: 12264 - DNA, 25 bp, Homo sapiens
acaagtgctgtggaacaaacctttt

SEQ ID NO: 12265 - DNA, 25 bp, Homo sapiens
acgtgtgctattgatgtggatttta

SEQ ID NO: 12266 - DNA, 25 bp, Homo sapiens
gaaaacgtcttgcaatctctttacc

SEQ ID NO: 12267 - DNA, 25 bp, Homo sapiens
gatgcaagtcacacgtgtgctattg

SEQ ID NO: 12268 - DNA, 25 bp, Homo sapiens
gggataaatctatctgagcccaaac

SEQ ID NO: 12269 - DNA, 25 bp, Homo sapiens
gtgcctcctacgatgagtttcagga

SEQ ID NO: 12270 - DNA, 25 bp, Homo sapiens
tgagtataatttttgtagcagcgac

SEQ ID NO: 12271 - DNA, 25 bp, Homo sapiens
ttcctctggaacaaacgtgggataa

SEQ ID NO: 12272 - DNA, 25 bp, Homo sapiens
ttgcaatctctttacccttgttaaa

SEQ ID NO: 12273 - DNA, 25 bp, Homo sapiens
tttgtagcagcgacactgtggaaga

SEQ ID NO: 12274 - DNA, 25 bp, Homo sapiens
aactggtttcgctgtcattcatgat

SEQ ID NO: 12275 - DNA, 25 bp, Homo sapiens
aatcccgagattgccaggagactgc

SEQ ID NO: 12276 - DNA, 25 bp, Homo sapiens
atgatgcggccagagcaggtttcct

SEQ ID NO: 12277 - DNA, 25 bp, Homo sapiens
caccgcctgtgatttggccaggctc

SEQ ID NO: 12278 - DNA, 25 bp, Homo sapiens
cacggccagcaatgtggggcatcgg

SEQ ID NO: 12279 - DNA, 25 bp, Homo sapiens
gaaccataagggggacaccgcctgt

SEQ ID NO: 12280 - DNA, 25 bp, Homo sapiens
gctgccaggggggacctagagcaac

SEQ ID NO: 12281 - DNA, 25 bp, Homo sapiens
ggaccctaaagaatggccgagcctt

SEQ ID NO: 12282 - DNA, 25 bp, Homo sapiens
ggctgggggagccacaaatcttcaa

SEQ ID NO: 12283 - DNA, 25 bp, Homo sapiens
tccgggtggtggagttcctggtgaa

SEQ ID NO: 12284 - DNA, 25 bp, Homo sapiens
ttgggggaacgagttggcgtccgca

SEQ ID NO: 12285 - DNA, 25 bp, Homo sapiens
aggtcatcctgtacagttctacagc

SEQ ID NO: 12286 - DNA, 25 bp, Homo sapiens
cagcatgaataggcctgcctctcgc

SEQ ID NO: 12287 - DNA, 25 bp, Homo sapiens
ctccaccgccacctgtggaagaacc

SEQ ID NO: 12288 - DNA, 25 bp, Homo sapiens
ctccttccattacttcacaaacaag

SEQ ID NO: 12289 - DNA, 25 bp, Homo sapiens
gagtctatcatgcattattctgagt

SEQ ID NO: 12290 - DNA, 25 bp, Homo sapiens
ggaagatgagctgtcctttcaggaa

SEQ ID NO: 12291 - DNA, 25 bp, Homo sapiens
ggaggacctttttatagccagaatc

SEQ ID NO: 12292 - DNA, 25 bp, Homo sapiens
actatttcacgctggctcagcaacc

SEQ ID NO: 12293 - DNA, 25 bp, Homo sapiens
agccagtccagtactatttcacgct

SEQ ID NO: 12294 - DNA, 25 bp, Homo sapiens
agctctaccagatccagcaagtcac

SEQ ID NO: 12295 - DNA, 25 bp, Homo sapiens
cagcagatcatcactaacacaggag

SEQ ID NO: 12296 - DNA, 25 bp, Homo sapiens
caggagagatccagcagatcccggt

SEQ ID NO: 12297 - DNA, 25 bp, Homo sapiens
cccaacaggcccagagtggcactgg

SEQ ID NO: 12298 - DNA, 25 bp, Homo sapiens
gcagttcagccagttcacagatgga

SEQ ID NO: 12299 - DNA, 25 bp, Homo sapiens
gcctgtatcaggcactcaagttgtg

SEQ ID NO: 12300 - DNA, 25 bp, Homo sapiens
gtcagcaggtgcagattgtccaggc

SEQ ID NO: 12301 - DNA, 25 bp, Homo sapiens
gtggcactggacagaccatgcaggt

SEQ ID NO: 12302 - DNA, 25 bp, Homo sapiens
tgggcagatcatcatcgcacagcct

SEQ ID NO: 12303 - DNA, 25 bp, Homo sapiens
aacactcagattattcccagttgct

SEQ ID NO: 12304 - DNA, 25 bp, Homo sapiens
aagctatgttcttcatcatgaccca

SEQ ID NO: 12305 - DNA, 25 bp, Homo sapiens
acagatccccctgaaattacgcttt

SEQ ID NO: 12306 - DNA, 25 bp, Homo sapiens
agtcagagtccttcagaacttctcc

SEQ ID NO: 12307 - DNA, 25 bp, Homo sapiens
atccttacatatacacaccctttgg

SEQ ID NO: 12308 - DNA, 25 bp, Homo sapiens
caccacccacctatgatactgtgct

SEQ ID NO: 12309 - DNA, 25 bp, Homo sapiens
ggcatgaggtttgctctcgtgaaca

SEQ ID NO: 12310 - DNA, 25 bp, Homo sapiens
gtagatatggagcccattcacatgg

SEQ ID NO: 12311 - DNA, 25 bp, Homo sapiens
tacgctttggaggacttcttctaac

SEQ ID NO: 12312 - DNA, 25 bp, Homo sapiens
tgggaactactttgtcctaccatca

SEQ ID NO: 12313 - DNA, 25 bp, Homo sapiens
aacagtgcccagaccaatattgatg

SEQ ID NO: 12314 - DNA, 25 bp, Homo sapiens
aaggaggtccttctagtagtccata

SEQ ID NO: 12315 - DNA, 25 bp, Homo sapiens
agtacaagcaagttcacctgacctc

SEQ ID NO: 12316 - DNA, 25 bp, Homo sapiens
agtagtccataatgagtcccagaat

SEQ ID NO: 12317 - DNA, 25 bp, Homo sapiens
caatataccccaatggaaccctgct

SEQ ID NO: 12318 - DNA, 25 bp, Homo sapiens
ctggctgggatggctctgatatagc

SEQ ID NO: 12319 - DNA, 25 bp, Homo sapiens
gcccgcacacaacggtcgagagaca

SEQ ID NO: 12320 - DNA, 25 bp, Homo sapiens
gggtgcatgccaactatcgaattat

SEQ ID NO: 12321 - DNA, 25 bp, Homo sapiens
gtaaccagacaattctacgtattct

SEQ ID NO: 12322 - DNA, 25 bp, Homo sapiens
tgtccatacagagtgtgcattccct

SEQ ID NO: 12323 - DNA, 25 bp, Homo sapiens
ttaaccttctggaacctgccaaaca

SEQ ID NO: 12324 - DNA, 25 bp, Homo sapiens
accctggtcaccgtgtcgagaggtg

SEQ ID NO: 12325 - DNA, 25 bp, Homo sapiens
ccagcagaagccaggacaggcccct

SEQ ID NO: 12326 - DNA, 25 bp, Homo sapiens
gaagttccagggcagagtcaccatt

SEQ ID NO: 12327 - DNA, 25 bp, Homo sapiens
gacacggccgtgtattactgtgcaa

SEQ ID NO: 12328 - DNA, 25 bp, Homo sapiens
gagtcaccattaccagggacacatc

SEQ ID NO: 12329 - DNA, 25 bp, Homo sapiens
gattctctggctccagctcaggaaa

SEQ ID NO: 12330 - DNA, 25 bp, Homo sapiens
ggctgactattactgtaactcccgg

SEQ ID NO: 12331 - DNA, 25 bp, Homo sapiens
gtttaagtcgcgtggtcattggggc

SEQ ID NO: 12332 - DNA, 25 bp, Homo sapiens
taactcccgggacagcagtggtaac

SEQ ID NO: 12333 - DNA, 25 bp, Homo sapiens
tcattggggccaaggtaccctggtc

SEQ ID NO: 12334 - DNA, 25 bp, Homo sapiens
tcggcggagggaccaagctgaccgt

SEQ ID NO: 12335 - DNA, 25 bp, Homo sapiens
agcaactacgagaggttcctgccac

SEQ ID NO: 12336 - DNA, 25 bp, Homo sapiens
caacctctcggccaagaccgagctg

SEQ ID NO: 12337 - DNA, 25 bp, Homo sapiens
caggcccatctcaaggtggacgtgt

SEQ ID NO: 12338 - DNA, 25 bp, Homo sapiens
catccacgtggacgacttccagagc

SEQ ID NO: 12339 - DNA, 25 bp, Homo sapiens
ccctgccccagggaaccatgatgga

SEQ ID NO: 12340 - DNA, 25 bp, Homo sapiens
gcaggagctggacaaggaccacgcc

SEQ ID NO: 12341 - DNA, 25 bp, Homo sapiens
gctttctgcaaggcctgctggaaac

SEQ ID NO: 12342 - DNA, 25 bp, Homo sapiens
ggaggaatccagtgggggcctcatc

SEQ ID NO: 12343 - DNA, 25 bp, Homo sapiens
taaggactcgtttgcctgaagcttc

SEQ ID NO: 12344 - DNA, 25 bp, Homo sapiens
tgagctactttcgctggcgggagac

SEQ ID NO: 12345 - DNA, 25 bp, Homo sapiens
tgtcccggtacaagttctatctggc

SEQ ID NO: 12346 - DNA, 25 bp, Homo sapiens
aaaatggcctctcacctggggccat

SEQ ID NO: 12347 - DNA, 25 bp, Homo sapiens
aatctgccccagcaactttttggct

SEQ ID NO: 12348 - DNA, 25 bp, Homo sapiens
agagacaatataccccaatgcatcc

SEQ ID NO: 12349 - DNA, 25 bp, Homo sapiens
ataggaactcaacaagctaccccag

SEQ ID NO: 12350 - DNA, 25 bp, Homo sapiens
attctaccctgaactttgaagccca

SEQ ID NO: 12351 - DNA, 25 bp, Homo sapiens
catgtataccataatgctctaccac

SEQ ID NO: 12352 - DNA, 25 bp, Homo sapiens
cctggcatgttttctgcatttcggg

SEQ ID NO: 12353 - DNA, 25 bp, Homo sapiens
cgaccagcgtgatctcacagagcac

SEQ ID NO: 12354 - DNA, 25 bp, Homo sapiens
ggattctacaccctacaagtcataa

SEQ ID NO: 12355 - DNA, 25 bp, Homo sapiens
tgattggagtagtggccctggttgc

SEQ ID NO: 12356 - DNA, 25 bp, Homo sapiens
tgctctgatagcagtagccctggca

SEQ ID NO: 12357 - DNA, 25 bp, Homo sapiens
agcacacaagagctctttatcccta

SEQ ID NO: 12358 - DNA, 25 bp, Homo sapiens
agtcactggctgcaacaggaccaca

SEQ ID NO: 12359 - DNA, 25 bp, Homo sapiens
ctgccacgccaataactcagtcact

SEQ ID NO: 12360 - DNA, 25 bp, Homo sapiens
gagacagaatctcaccatgttgccc

SEQ ID NO: 12361 - DNA, 25 bp, Homo sapiens
gagattacagataatgctctaccac

SEQ ID NO: 12362 - DNA, 25 bp, Homo sapiens
tgcacagtactcctggcttatcaat

SEQ ID NO: 12363 - DNA, 25 bp, Homo sapiens
aaataccatctccgtggatcggcca

SEQ ID NO: 12364 - DNA, 25 bp, Homo sapiens
agaaggtccttaacacagtcgtgaa

SEQ ID NO: 12365 - DNA, 25 bp, Homo sapiens
caacgttctggagtggctgcagctc

SEQ ID NO: 12366 - DNA, 25 bp, Homo sapiens
cacagcctggcagctctgatcagga

SEQ ID NO: 12367 - DNA, 25 bp, Homo sapiens
cactatgacacagaccagtccggca

SEQ ID NO: 12368 - DNA, 25 bp, Homo sapiens
gacacacgggttcacactggagtcc

SEQ ID NO: 12369 - DNA, 25 bp, Homo sapiens
gatggctctggaaagctcaacctgc

SEQ ID NO: 12370 - DNA, 25 bp, Homo sapiens
gctgcttcgttaggctggagggcat

SEQ ID NO: 12371 - DNA, 25 bp, Homo sapiens
ggtatcatcaagctcaacgttctgg

SEQ ID NO: 12372 - DNA, 25 bp, Homo sapiens
tggagtcctgccgtagcatgattgc

SEQ ID NO: 12373 - DNA, 25 bp, Homo sapiens
ttgacagtttcatctgctgcttcgt

SEQ ID NO: 12374 - DNA, 25 bp, Homo sapiens
acaacaacaagcttaccagagtacc

SEQ ID NO: 12375 - DNA, 25 bp, Homo sapiens
cagagtacctggtgggctggcagag

SEQ ID NO: 12376 - DNA, 25 bp, Homo sapiens
cagcagagttgatgcagctagcctg

SEQ ID NO: 12377 - DNA, 25 bp, Homo sapiens
ccttacggaattacatcttgatggc

SEQ ID NO: 12378 - DNA, 25 bp, Homo sapiens
ctgagggagcttcacttggacaaca

SEQ ID NO: 12379 - DNA, 25 bp, Homo sapiens
gatgcagctagcctgaaaggactga

SEQ ID NO: 12380 - DNA, 25 bp, Homo sapiens
gccaacacgcctcatctgagggagc

SEQ ID NO: 12381 - DNA, 25 bp, Homo sapiens
ggctggcagagcataagtacatcca

SEQ ID NO: 12382 - DNA, 25 bp, Homo sapiens
gtacatccaggttgtctaccttcat

SEQ ID NO: 12383 - DNA, 25 bp, Homo sapiens
tcctccttcccttacggaattacat

SEQ ID NO: 12384 - DNA, 25 bp, Homo sapiens
tctgctgttgacaatggctctctgg

SEQ ID NO: 12385 - DNA, 25 bp, Homo sapiens
cagtatctaaagtcctacacaaggc

SEQ ID NO: 12386 - DNA, 25 bp, Homo sapiens
ccaccgctgtagtagtagtcgaatt

SEQ ID NO: 12387 - DNA, 25 bp, Homo sapiens
ccacggtctctcagtatctaaagtc

SEQ ID NO: 12388 - DNA, 25 bp, Homo sapiens
ctctcagtatctaaagtcctacaca

SEQ ID NO: 12389 - DNA, 25 bp, Homo sapiens
gaattatcatctccttcaactaatg

SEQ ID NO: 12390 - DNA, 25 bp, Homo sapiens
gatacgacactggttcttgtgaacg

SEQ ID NO: 12391 - DNA, 25 bp, Homo sapiens
ggtctctcagtatctaaagtcctac

SEQ ID NO: 12392 - DNA, 25 bp, Homo sapiens
gtagtagtcgaattatcatctcctt

SEQ ID NO: 12393 - DNA, 25 bp, Homo sapiens
gtagtcgaattatcatctccttcaa

SEQ ID NO: 12394 - DNA, 25 bp, Homo sapiens
atgcctcttgtatgttgatgccact

SEQ ID NO: 12395 - DNA, 25 bp, Homo sapiens
caacatcctgttgctctaactggag

SEQ ID NO: 12396 - DNA, 25 bp, Homo sapiens
cagagtctatccattcatgcctctt

SEQ ID NO: 12397 - DNA, 25 bp, Homo sapiens
ccccttaccccggacaggatgaatg

SEQ ID NO: 12398 - DNA, 25 bp, Homo sapiens
cgattccttgtagagctgctgcaat

SEQ ID NO: 12399 - DNA, 25 bp, Homo sapiens
ctctttcccttatttaggagccctg

SEQ ID NO: 12400 - DNA, 25 bp, Homo sapiens
ggagcacattcacttacgaacacca

SEQ ID NO: 12401 - DNA, 25 bp, Homo sapiens
ggcaatgagttagggctccttttcc

SEQ ID NO: 12402 - DNA, 25 bp, Homo sapiens
gtttccacacctcttaggggatgcg

SEQ ID NO: 12403 - DNA, 25 bp, Homo sapiens
tgcgcattaaacttcttttgccccc

SEQ ID NO: 12404 - DNA, 25 bp, Homo sapiens
ttagaggggcagttctacctcctct

SEQ ID NO: 12405 - DNA, 25 bp, Homo sapiens
acttctcaccatttgagttgcccat

SEQ ID NO: 12406 - DNA, 25 bp, Homo sapiens
acttttatgccttcactttacaaat

SEQ ID NO: 12407 - DNA, 25 bp, Homo sapiens
agcactatttacatacaggccatac

SEQ ID NO: 12408 - DNA, 25 bp, Homo sapiens
cccatcttgtttcacactagtcaca

SEQ ID NO: 12409 - DNA, 25 bp, Homo sapiens
cctgtgtgccattttaagagttact

SEQ ID NO: 12410 - DNA, 25 bp, Homo sapiens
gaatggggaccttttgagttgaatt

SEQ ID NO: 12411 - DNA, 25 bp, Homo sapiens
gaccactgtatgtttacttctcacc

SEQ ID NO: 12412 - DNA, 25 bp, Homo sapiens
gtttggtaacttttatgccttcact

SEQ ID NO: 12413 - DNA, 25 bp, Homo sapiens
tcacactagtcacattcttgtttta

SEQ ID NO: 12414 - DNA, 25 bp, Homo sapiens
tcacctacgcgagtcttactttgag

SEQ ID NO: 12415 - DNA, 25 bp, Homo sapiens
tcacctcttctaatcttttaatgta

SEQ ID NO: 12416 - DNA, 25 bp, Homo sapiens
aactgtttacagttaatctgtgtct

SEQ ID NO: 12417 - DNA, 25 bp, Homo sapiens
cacccagtctgatcaggctgagttt

SEQ ID NO: 12418 - DNA, 25 bp, Homo sapiens
cagatctttttacagtatccattta

SEQ ID NO: 12419 - DNA, 25 bp, Homo sapiens
ggctgagttttgtatgtatctatct

SEQ ID NO: 12420 - DNA, 25 bp, Homo sapiens
gtatctatctgttaatgcttgttac

SEQ ID NO: 12421 - DNA, 25 bp, Homo sapiens
gttacttttaactaatcagatcttt

SEQ ID NO: 12422 - DNA, 25 bp, Homo sapiens
tatctgttaatgcttgttactttta

SEQ ID NO: 12423 - DNA, 25 bp, Homo sapiens
tcacacccagtctgatcaggctgag

SEQ ID NO: 12424 - DNA, 25 bp, Homo sapiens
tccttgaaggctaccccttgggaag

SEQ ID NO: 12425 - DNA, 25 bp, Homo sapiens
tctgtgtctaattatctgatttttt

SEQ ID NO: 12426 - DNA, 25 bp, Homo sapiens
ttgaaggctaccccttgggaaggct

SEQ ID NO: 12427 - DNA, 25 bp, Homo sapiens
tggagattccaactctaatgtcaat

SEQ ID NO: 12428 - DNA, 25 bp, Homo sapiens
aaaagacatcttcgaatccatattt

SEQ ID NO: 12429 - DNA, 25 bp, Homo sapiens
aatagcccattgttcattcttgtgc

SEQ ID NO: 12430 - DNA, 25 bp, Homo sapiens
atggtccattcacctttatgttata

SEQ ID NO: 12431 - DNA, 25 bp, Homo sapiens
attgtaaatcttttgtgtctcctga

SEQ ID NO: 12432 - DNA, 25 bp, Homo sapiens
cccattgttcattcttgtgctgtac

SEQ ID NO: 12433 - DNA, 25 bp, Homo sapiens
cttcccttaaaattagctctgagtg

SEQ ID NO: 12434 - DNA, 25 bp, Homo sapiens
gaatccatatttcaagcctggtaga

SEQ ID NO: 12435 - DNA, 25 bp, Homo sapiens
gaattggcttttctagcagaacctt

SEQ ID NO: 12436 - DNA, 25 bp, Homo sapiens
gattttgtagccaacattcattcaa

SEQ ID NO: 12437 - DNA, 25 bp, Homo sapiens
tactttgacttttcagagcacaccc

SEQ ID NO: 12438 - DNA, 25 bp, Homo sapiens
tgtctcctgaagacttcccttaaaa

SEQ ID NO: 12439 - DNA, 25 bp, Homo sapiens
agaggcaggcatagaggcttctccg

SEQ ID NO: 12440 - DNA, 25 bp, Homo sapiens
aggccagcctccgagagggagagag

SEQ ID NO: 12441 - DNA, 25 bp, Homo sapiens
cttccctagctttagaccctgggtg

SEQ ID NO: 12442 - DNA, 25 bp, Homo sapiens
gcaaacgctaaagagcccttgcctc

SEQ ID NO: 12443 - DNA, 25 bp, Homo sapiens
gccaagtggggtgctgggaggaggg

SEQ ID NO: 12444 - DNA, 25 bp, Homo sapiens
ggaggggtgtggcagtggttttggc

SEQ ID NO: 12445 - DNA, 25 bp, Homo sapiens
gggagagggaggtcactggaaaggg

SEQ ID NO: 12446 - DNA, 25 bp, Homo sapiens
gtcactggaggttgaagccaagtgg

SEQ ID NO: 12447 - DNA, 25 bp, Homo sapiens
gtggcagtggttttggcaaacgcta

SEQ ID NO: 12448 - DNA, 25 bp, Homo sapiens
tcctccccaaatcaatacactagtt

SEQ ID NO: 12449 - DNA, 25 bp, Homo sapiens
tttagaccctgggtgggctctgtgc

SEQ ID NO: 12450 - DNA, 25 bp, Homo sapiens
aaagcttgtcaatcactcatgtgtt

SEQ ID NO: 12451 - DNA, 25 bp, Homo sapiens
aatggtgcatttgtgcttctgaact

SEQ ID NO: 12452 - DNA, 25 bp, Homo sapiens
acctcaagtatcaattcatcctcca

SEQ ID NO: 12453 - DNA, 25 bp, Homo sapiens
atcttcaagctgcagggtgcctaga

SEQ ID NO: 12454 - DNA, 25 bp, Homo sapiens
gaaatgggccgttgtctgtagccct

SEQ ID NO: 12455 - DNA, 25 bp, Homo sapiens
gacatttgccaccactgcaagcaaa

SEQ ID NO: 12456 - DNA, 25 bp, Homo sapiens
gtgtgtactatgctctattgctata

SEQ ID NO: 12457 - DNA, 25 bp, Homo sapiens
tccctgatccacatttggctgttta

SEQ ID NO: 12458 - DNA, 25 bp, Homo sapiens
tctgtagccctggcatgtgcacacg

SEQ ID NO: 12459 - DNA, 25 bp, Homo sapiens
tgaagagtcacttctgtttacctca

SEQ ID NO: 12460 - DNA, 25 bp, Homo sapiens
tgctgctgtgggttaacaactcaga

SEQ ID NO: 12461 - DNA, 25 bp, Homo sapiens
aagcagcctagggatgagcatttct

SEQ ID NO: 12462 - DNA, 25 bp, Homo sapiens
agcccctctttccagcactggaaag

SEQ ID NO: 12463 - DNA, 25 bp, Homo sapiens
agctgagaagcacttcacactcctc

SEQ ID NO: 12464 - DNA, 25 bp, Homo sapiens
gcagctgtgtatggtattatgtctt

SEQ ID NO: 12465 - DNA, 25 bp, Homo sapiens
gcttctctgcacttgtttggagctc

SEQ ID NO: 12466 - DNA, 25 bp, Homo sapiens
ggagctccccaaaacaggagccatg

SEQ ID NO: 12467 - DNA, 25 bp, Homo sapiens
gtcttataatcctgcatcacttcta

SEQ ID NO: 12468 - DNA, 25 bp, Homo sapiens
gtggcagttcagagacacgcttttc

SEQ ID NO: 12469 - DNA, 25 bp, Homo sapiens
gtggtcttgagcccagctgagaagc

SEQ ID NO: 12470 - DNA, 25 bp, Homo sapiens
gtttgtgtcagtctgcagctgtgta

SEQ ID NO: 12471 - DNA, 25 bp, Homo sapiens
tcacttctatcctatccagtcatat

SEQ ID NO: 12472 - DNA, 25 bp, Homo sapiens
aaagcatccctggagggcaacctgg

SEQ ID NO: 12473 - DNA, 25 bp, Homo sapiens
atcctgctggatgtgaagacgcggc

SEQ ID NO: 12474 - DNA, 25 bp, Homo sapiens
ccaggatggcaaggtcatctcctcc

SEQ ID NO: 12475 - DNA, 25 bp, Homo sapiens
cccgtcaggtgcgtaccattgtgga

SEQ ID NO: 12476 - DNA, 25 bp, Homo sapiens
ctggagcaggagattgccacctacc

SEQ ID NO: 12477 - DNA, 25 bp, Homo sapiens
gacagagaaccgctactgcgtgcag

SEQ ID NO: 12478 - DNA, 25 bp, Homo sapiens
gaccacccgctgaggactcagctac

SEQ ID NO: 12479 - DNA, 25 bp, Homo sapiens
gcccagcttcgctgcgagatggagc

SEQ ID NO: 12480 - DNA, 25 bp, Homo sapiens
gtcccagatccaggggctgattggc

SEQ ID NO: 12481 - DNA, 25 bp, Homo sapiens
tgcagtcccagctcagcatgaaagc

SEQ ID NO: 12482 - DNA, 25 bp, Homo sapiens
tggagggagaggatgcccacctgac

SEQ ID NO: 12483 - DNA, 25 bp, Homo sapiens
cagctggaggccgagtttctgggga

SEQ ID NO: 12484 - DNA, 25 bp, Homo sapiens
cccagaaagccttattgagcccctt

SEQ ID NO: 12485 - DNA, 25 bp, Homo sapiens
ctccacttgcttccaaggtgctagg

SEQ ID NO: 12486 - DNA, 25 bp, Homo sapiens
ctcgaaggaagcacaaaccctccat

SEQ ID NO: 12487 - DNA, 25 bp, Homo sapiens
ctgcacttgtggcctcgaaggaagc

SEQ ID NO: 12488 - DNA, 25 bp, Homo sapiens
gctagggaagtttcagggtacgctg

SEQ ID NO: 12489 - DNA, 25 bp, Homo sapiens
ggagcttcacgttgccgagtggaag

SEQ ID NO: 12490 - DNA, 25 bp, Homo sapiens
gtggaagaaccatgacctccacttg

SEQ ID NO: 12491 - DNA, 25 bp, Homo sapiens
tcgattcaatgcccgatgcttctgt

SEQ ID NO: 12492 - DNA, 25 bp, Homo sapiens
ttcctgagaggcaggtcttccgtcc

SEQ ID NO: 12493 - DNA, 25 bp, Homo sapiens
ttggtgtaagcaacctgtggcctgc

SEQ ID NO: 12494 - DNA, 25 bp, Homo sapiens
agaaatgccttaaactgcaacgtcc

SEQ ID NO: 12495 - DNA, 25 bp, Homo sapiens
aggacccgatgaagcgggcggcggt

SEQ ID NO: 12496 - DNA, 25 bp, Homo sapiens
aggtggcagggatggctccgaagcc

SEQ ID NO: 12497 - DNA, 25 bp, Homo sapiens
ccaaggtcaaggggcaggtgcagag

SEQ ID NO: 12498 - DNA, 25 bp, Homo sapiens
ctgggtgccgtgttactaactctag

SEQ ID NO: 12499 - DNA, 25 bp, Homo sapiens
gagctcactgtgggatggggttgac

SEQ ID NO: 12500 - DNA, 25 bp, Homo sapiens
gccatggctgtgttcttcatgtgtt

SEQ ID NO: 12501 - DNA, 25 bp, Homo sapiens
gtatgtttctgtgtcaatcgctgtg

SEQ ID NO: 12502 - DNA, 25 bp, Homo sapiens
gtcagtgaaagtcgtccttgtctca

SEQ ID NO: 12503 - DNA, 25 bp, Homo sapiens
gtgttgattttatttgacccctgga

SEQ ID NO: 12504 - DNA, 25 bp, Homo sapiens
tggagtggtgggtctcatctttccc

SEQ ID NO: 12505 - DNA, 25 bp, Homo sapiens
agatctcgagcgtttatctcgggct

SEQ ID NO: 12506 - DNA, 25 bp, Homo sapiens
caccatcagatgcagttccctattt

SEQ ID NO: 12507 - DNA, 25 bp, Homo sapiens
cactgtggttgagtaacatcacctc

SEQ ID NO: 12508 - DNA, 25 bp, Homo sapiens
gattccttgattggtaagctctcca

SEQ ID NO: 12509 - DNA, 25 bp, Homo sapiens
gatttgtcatccagtattaagttct

SEQ ID NO: 12510 - DNA, 25 bp, Homo sapiens
gtttatctcgggctttaatttgcta

SEQ ID NO: 12511 - DNA, 25 bp, Homo sapiens
taagctttctaatggtgtcttcaga

SEQ ID NO: 12512 - DNA, 25 bp, Homo sapiens
tattccaactccgagcactgtggtt

SEQ ID NO: 12513 - DNA, 25 bp, Homo sapiens
tgcagctttcattacagattccttg

SEQ ID NO: 12514 - DNA, 25 bp, Homo sapiens
tggattcactactggcacattaaca

SEQ ID NO: 12515 - DNA, 25 bp, Homo sapiens
tttaaaatttcattccaccaccatc

SEQ ID NO: 12516 - DNA, 25 bp, Homo sapiens
aaagaaccagatgctctccagggtc

SEQ ID NO: 12517 - DNA, 25 bp, Homo sapiens
aactgcatgagcaacatcactcgaa

SEQ ID NO: 12518 - DNA, 25 bp, Homo sapiens
atcctgcaagcacattccaagactg

SEQ ID NO: 12519 - DNA, 25 bp, Homo sapiens
caaccaattgcgatgctgtcctgtt

SEQ ID NO: 12520 - DNA, 25 bp, Homo sapiens
cagctcctaactcaccatgtgacat

SEQ ID NO: 12521 - DNA, 25 bp, Homo sapiens
ggatcttttccatctgagggtacag

SEQ ID NO: 12522 - DNA, 25 bp, Homo sapiens
gtccctgagggcggttaggagttct

SEQ ID NO: 12523 - DNA, 25 bp, Homo sapiens
tactttgctatctcatgggtcttca

SEQ ID NO: 12524 - DNA, 25 bp, Homo sapiens
taggagttctgggtgaccatcctgg

SEQ ID NO: 12525 - DNA, 25 bp, Homo sapiens
tcaccatgtgacatcaggctatccc

SEQ ID NO: 12526 - DNA, 25 bp, Homo sapiens
tgctctctgttcttgtatactcaat

SEQ ID NO: 12527 - DNA, 25 bp, Homo sapiens
agagaatcctactcaaatttcactg

SEQ ID NO: 12528 - DNA, 25 bp, Homo sapiens
atattttaagcattcctctcctttc

SEQ ID NO: 12529 - DNA, 25 bp, Homo sapiens
cagaaatcctctagttggtgcctcc

SEQ ID NO: 12530 - DNA, 25 bp, Homo sapiens
ctcccttctgcgtgtaagccatggg

SEQ ID NO: 12531 - DNA, 25 bp, Homo sapiens
gcttctggttaaacacaggtccctc

SEQ ID NO: 12532 - DNA, 25 bp, Homo sapiens
ggatgccttttcacatcatttcagt

SEQ ID NO: 12533 - DNA, 25 bp, Homo sapiens
ggtggtggggcaacactgcttaatg

SEQ ID NO: 12534 - DNA, 25 bp, Homo sapiens
gtccctcttccacatcaaatgaaca

SEQ ID NO: 12535 - DNA, 25 bp, Homo sapiens
gtgtggtcaattctggacacttccc

SEQ ID NO: 12536 - DNA, 25 bp, Homo sapiens
tttagccctcatgactgtattttct

SEQ ID NO: 12537 - DNA, 25 bp, Homo sapiens
ttttgggtctgtgttctttctaccg

SEQ ID NO: 12538 - DNA, 25 bp, Homo sapiens
aaatgtcctgtactgctaacgaatg

SEQ ID NO: 12539 - DNA, 25 bp, Homo sapiens
aacttactgcgatttgttctcaaaa

SEQ ID NO: 12540 - DNA, 25 bp, Homo sapiens
agcattgtagtcatggcaacccgct

SEQ ID NO: 12541 - DNA, 25 bp, Homo sapiens
atgtccaggagttctccagtggaat

SEQ ID NO: 12542 - DNA, 25 bp, Homo sapiens
gatggataccacacaaacttcttgt

SEQ ID NO: 12543 - DNA, 25 bp, Homo sapiens
gcaacccgctaaactttctcatgca

SEQ ID NO: 12544 - DNA, 25 bp, Homo sapiens
gcaactctgaagtcttaattccttt

SEQ ID NO: 12545 - DNA, 25 bp, Homo sapiens
ggtgggggttgtacatttcccattg

SEQ ID NO: 12546 - DNA, 25 bp, Homo sapiens
tagttgctgtttgtaccaaccttaa

SEQ ID NO: 12547 - DNA, 25 bp, Homo sapiens
tatgcactactttacatttcatggg

SEQ ID NO: 12548 - DNA, 25 bp, Homo sapiens
tttaatactgactagcaactctgaa

SEQ ID NO: 12549 - DNA, 25 bp, Homo sapiens
acagctgagtaattctaatctcttc

SEQ ID NO: 12550 - DNA, 25 bp, Homo sapiens
cccatgcttctcaccaaatttttgt

SEQ ID NO: 12551 - DNA, 25 bp, Homo sapiens
cttcactctagccttcgtatttgtg

SEQ ID NO: 12552 - DNA, 25 bp, Homo sapiens
gtgtcacagaactatgctgcctaaa

SEQ ID NO: 12553 - DNA, 25 bp, Homo sapiens
taatattggttggaccttgcccatc

SEQ ID NO: 12554 - DNA, 25 bp, Homo sapiens
taattttagattcgccttacaatgt

SEQ ID NO: 12555 - DNA, 25 bp, Homo sapiens
tccttgccttaaccacaaattgtgg

SEQ ID NO: 12556 - DNA, 25 bp, Homo sapiens
tgcctaaagtgatcttggctcctta

SEQ ID NO: 12557 - DNA, 25 bp, Homo sapiens
ttggccccttggatagttaacagct

SEQ ID NO: 12558 - DNA, 25 bp, Homo sapiens
ttggctccttaatggtccttttggc

SEQ ID NO: 12559 - DNA, 25 bp, Homo sapiens
ttgtcattgagggcacttggataac

SEQ ID NO: 12560 - DNA, 25 bp, Homo sapiens
atgctcgattattccctgtacaata

SEQ ID NO: 12561 - DNA, 25 bp, Homo sapiens
attccatatattagcatttagtcca

SEQ ID NO: 12562 - DNA, 25 bp, Homo sapiens
attgcatatgcatagttcccatgtt

SEQ ID NO: 12563 - DNA, 25 bp, Homo sapiens
gcatttagtccaatgtctttttaag

SEQ ID NO: 12564 - DNA, 25 bp, Homo sapiens
gctgtctttacatggggttttcaat

SEQ ID NO: 12565 - DNA, 25 bp, Homo sapiens
gtgagcttatcatgctgtctttaca

SEQ ID NO: 12566 - DNA, 25 bp, Homo sapiens
gttctactcatatatatctatctta

SEQ ID NO: 12567 - DNA, 25 bp, Homo sapiens
gttttcaattttgcatgctcgatta

SEQ ID NO: 12568 - DNA, 25 bp, Homo sapiens
tatgtgtgtgtatgctactacaaaa

SEQ ID NO: 12569 - DNA, 25 bp, Homo sapiens
tattgcttgatacttttgacaacaa

SEQ ID NO: 12570 - DNA, 25 bp, Homo sapiens
tcctccttgttctactcatatatat

SEQ ID NO: 12571 - DNA, 25 bp, Homo sapiens
aaaccatatcacatgcctacatttt

SEQ ID NO: 12572 - DNA, 25 bp, Homo sapiens
atcctgggtgtttatcacgttcaga

SEQ ID NO: 12573 - DNA, 25 bp, Homo sapiens
caccgctcagctgtcttgtaaaaca

SEQ ID NO: 12574 - DNA, 25 bp, Homo sapiens
cctgggtagtctgtgcttgtaatcc

SEQ ID NO: 12575 - DNA, 25 bp, Homo sapiens
ctaacatagtactttctttccagca

SEQ ID NO: 12576 - DNA, 25 bp, Homo sapiens
gcacctctggctgttacattaccat

SEQ ID NO: 12577 - DNA, 25 bp, Homo sapiens
gctattgcatgattagccccctatc

SEQ ID NO: 12578 - DNA, 25 bp, Homo sapiens
gctcctgtagctgcattatttcttg

SEQ ID NO: 12579 - DNA, 25 bp, Homo sapiens
ggggtctatgtcattggtttctgat

SEQ ID NO: 12580 - DNA, 25 bp, Homo sapiens
gtaagcctgttgtgactttgctttt

SEQ ID NO: 12581 - DNA, 25 bp, Homo sapiens
tttctggttctagtaatcctgggtg

SEQ ID NO: 12582 - DNA, 25 bp, Homo sapiens
agtatcgctttgtatcatgaggcca

SEQ ID NO: 12583 - DNA, 25 bp, Homo sapiens
caaaaggcctggccattttctggtt

SEQ ID NO: 12584 - DNA, 25 bp, Homo sapiens
gaggccaagaaattccatgttgttt

SEQ ID NO: 12585 - DNA, 25 bp, Homo sapiens
gatgtacttagagctttttgagtgt

SEQ ID NO: 12586 - DNA, 25 bp, Homo sapiens
gatgttgcctacactgctagactac

SEQ ID NO: 12587 - DNA, 25 bp, Homo sapiens
gcaagtgcattttataagtgttcta

SEQ ID NO: 12588 - DNA, 25 bp, Homo sapiens
gctagactacagtttagtatcgctt

SEQ ID NO: 12589 - DNA, 25 bp, Homo sapiens
gtatttgcagagtattagctttgaa

SEQ ID NO: 12590 - DNA, 25 bp, Homo sapiens
gttggctagtgcaaaaggcctggcc

SEQ ID NO: 12591 - DNA, 25 bp, Homo sapiens
tagtatttacaggtggcttctttta

SEQ ID NO: 12592 - DNA, 25 bp, Homo sapiens
tttctggttcccatgatgttgccta

SEQ ID NO: 12593 - DNA, 25 bp, Homo sapiens
aggaactggacaacgcactcaatga

SEQ ID NO: 12594 - DNA, 25 bp, Homo sapiens
caggcggacaagtattccaccaaag

SEQ ID NO: 12595 - DNA, 25 bp, Homo sapiens
ctgggagcagcctagggagagcccc

SEQ ID NO: 12596 - DNA, 25 bp, Homo sapiens
gacaacgcactcaatgacatcacct

SEQ ID NO: 12597 - DNA, 25 bp, Homo sapiens
gaggagcagaaattgccaacattgc

SEQ ID NO: 12598 - DNA, 25 bp, Homo sapiens
gatgaagtctatgcccagaagatga

SEQ ID NO: 12599 - DNA, 25 bp, Homo sapiens
ggtggccgagagtaaatgtggggac

SEQ ID NO: 12600 - DNA, 25 bp, Homo sapiens
gtaaatgtggggacctagaggagga

SEQ ID NO: 12601 - DNA, 25 bp, Homo sapiens
tcctttccattctctctatggggag

SEQ ID NO: 12602 - DNA, 25 bp, Homo sapiens
tggaggcccaggcggacaagtattc

SEQ ID NO: 12603 - DNA, 25 bp, Homo sapiens
ttgccaacattgcacagccaggctg

SEQ ID NO: 12604 - DNA, 25 bp, Homo sapiens
acacttccataatctggactcctct

SEQ ID NO: 12605 - DNA, 25 bp, Homo sapiens
agctcccaaggctctgagcaaatgt

SEQ ID NO: 12606 - DNA, 25 bp, Homo sapiens
ataaattgctccttgacattgtaga

SEQ ID NO: 12607 - DNA, 25 bp, Homo sapiens
cagtactttacctcctatcagaagt

SEQ ID NO: 12608 - DNA, 25 bp, Homo sapiens
ctcttggcaggtactcagcgaatga

SEQ ID NO: 12609 - DNA, 25 bp, Homo sapiens
gagcaaatgtggctcctgggggttc

SEQ ID NO: 12610 - DNA, 25 bp, Homo sapiens
gattttttacagctgcctgcagtac

SEQ ID NO: 12611 - DNA, 25 bp, Homo sapiens
ggtactatgttagccccataatttt

SEQ ID NO: 12612 - DNA, 25 bp, Homo sapiens
tgactcgtatatgtctcaggtccct

SEQ ID NO: 12613 - DNA, 25 bp, Homo sapiens
tgttgggtgcaaagttccctacttc

SEQ ID NO: 12614 - DNA, 25 bp, Homo sapiens
ttcctgtgacttcagctctgtttta

SEQ ID NO: 12615 - DNA, 25 bp, Homo sapiens
aaatgggtgatctctctgagtcctg

SEQ ID NO: 12616 - DNA, 25 bp, Homo sapiens
agctctcaatcctcggtgatatggg

SEQ ID NO: 12617 - DNA, 25 bp, Homo sapiens
cagcaaaactactgcttattctcca

SEQ ID NO: 12618 - DNA, 25 bp, Homo sapiens
gaaagagttcacttcatagagaata

SEQ ID NO: 12619 - DNA, 25 bp, Homo sapiens
gaatattgggagctctcaatcctcg

SEQ ID NO: 12620 - DNA, 25 bp, Homo sapiens
gagaactgagtatttgccctatgac

SEQ ID NO: 12621 - DNA, 25 bp, Homo sapiens
gaggtaccatatatttagggtgcta

SEQ ID NO: 12622 - DNA, 25 bp, Homo sapiens
ggcaacatccagcaaaactactgct

SEQ ID NO: 12623 - DNA, 25 bp, Homo sapiens
tcacgccacacggaaatctttaagt

SEQ ID NO: 12624 - DNA, 25 bp, Homo sapiens
tgaaatggtttcacgccacacggaa

SEQ ID NO: 12625 - DNA, 25 bp, Homo sapiens
tttgccctatgactgagctttctat

SEQ ID NO: 12626 - DNA, 25 bp, Homo sapiens
agtgtgaacagggcccatggtgtat

SEQ ID NO: 12627 - DNA, 25 bp, Homo sapiens
cacatggttctagcctggacctggc

SEQ ID NO: 12628 - DNA, 25 bp, Homo sapiens
ccatggtgtattctaggccacagcc

SEQ ID NO: 12629 - DNA, 25 bp, Homo sapiens
cctgtcccaacagctgacagccagg

SEQ ID NO: 12630 - DNA, 25 bp, Homo sapiens
ctcccctgtggtgagtaccgtggaa

SEQ ID NO: 12631 - DNA, 25 bp, Homo sapiens
gccaccctagtgtgctaagctgagc

SEQ ID NO: 12632 - DNA, 25 bp, Homo sapiens
ggacaatctctgcagggctgggagt

SEQ ID NO: 12633 - DNA, 25 bp, Homo sapiens
ggtttagccacatgagggagcagag

SEQ ID NO: 12634 - DNA, 25 bp, Homo sapiens
gtgggtagggactgaaggtctcaat

SEQ ID NO: 12635 - DNA, 25 bp, Homo sapiens
taggcatgcatatgaggtcttcccc

SEQ ID NO: 12636 - DNA, 25 bp, Homo sapiens
tccccataccctctgggtgttgaga

SEQ ID NO: 12637 - DNA, 25 bp, Homo sapiens
agataccataagctttttctctgaa

SEQ ID NO: 12638 - DNA, 25 bp, Homo sapiens
cccactccacagttaggccaagaat

SEQ ID NO: 12639 - DNA, 25 bp, Homo sapiens
gaactcatgtgatttacccttttca

SEQ ID NO: 12640 - DNA, 25 bp, Homo sapiens
gaggactctcacgatatgcaagttc

SEQ ID NO: 12641 - DNA, 25 bp, Homo sapiens
gcctcatcctccactgaagagtatg

SEQ ID NO: 12642 - DNA, 25 bp, Homo sapiens
ggtgcctaatgttccatgtctgaag

SEQ ID NO: 12643 - DNA, 25 bp, Homo sapiens
gtgtgattgtgaacttggtgcctaa

SEQ ID NO: 12644 - DNA, 25 bp, Homo sapiens
tgaatgccagtccagatgtgcctag

SEQ ID NO: 12645 - DNA, 25 bp, Homo sapiens
tgccccagtgctacacgttggagta

SEQ ID NO: 12646 - DNA, 25 bp, Homo sapiens
ttcatctgtctgtcccagttaactg

SEQ ID NO: 12647 - DNA, 25 bp, Homo sapiens
ttggccctgttaaggcatccacttc

SEQ ID NO: 12648 - DNA, 25 bp, Homo sapiens
aactctcatttccttagtaagccaa

SEQ ID NO: 12649 - DNA, 25 bp, Homo sapiens
aatgtttaacattttgtgccaattt

SEQ ID NO: 12650 - DNA, 25 bp, Homo sapiens
agttccttgttacatcatggtcatt

SEQ ID NO: 12651 - DNA, 25 bp, Homo sapiens
atagcatgatgctctgcagttttat

SEQ ID NO: 12652 - DNA, 25 bp, Homo sapiens
gatgcaattggttctcctgcattga

SEQ ID NO: 12653 - DNA, 25 bp, Homo sapiens
gccaatttgttcctgtattcatgta

SEQ ID NO: 12654 - DNA, 25 bp, Homo sapiens
gttaacatttatacttgccttggac

SEQ ID NO: 12655 - DNA, 25 bp, Homo sapiens
gttacagatctgactcttcattttt

SEQ ID NO: 12656 - DNA, 25 bp, Homo sapiens
taaccatacaactctcatttcctta

SEQ ID NO: 12657 - DNA, 25 bp, Homo sapiens
tacaatcaagtcattttacctttac

SEQ ID NO: 12658 - DNA, 25 bp, Homo sapiens
tacttgccttggactgtagaacaga

SEQ ID NO: 12659 - DNA, 25 bp, Homo sapiens
aaggcagctcagaagattagaacca

SEQ ID NO: 12660 - DNA, 25 bp, Homo sapiens
agaatcttctacctcataacttcct

SEQ ID NO: 12661 - DNA, 25 bp, Homo sapiens
agaccttggagcatatgtgcaactt

SEQ ID NO: 12662 - DNA, 25 bp, Homo sapiens
ctgtgcttttgaatgactttatcat

SEQ ID NO: 12663 - DNA, 25 bp, Homo sapiens
gaaccagacttactaaccaattcca

SEQ ID NO: 12664 - DNA, 25 bp, Homo sapiens
gagtatctagttaatcagtgcagta

SEQ ID NO: 12665 - DNA, 25 bp, Homo sapiens
gatggcagtgacaaagtgctagcat

SEQ ID NO: 12666 - DNA, 25 bp, Homo sapiens
gcagtagttggaaaccttgctggtg

SEQ ID NO: 12667 - DNA, 25 bp, Homo sapiens
ggtgtatgtgatgtgcttctgtgct

SEQ ID NO: 12668 - DNA, 25 bp, Homo sapiens
gtgctagcatttattgttatctaat

SEQ ID NO: 12669 - DNA, 25 bp, Homo sapiens
tttgatgttcaagtcctagtctata

SEQ ID NO: 12670 - DNA, 25 bp, Homo sapiens
atctatgctagattgtcattttccc

SEQ ID NO: 12671 - DNA, 25 bp, Homo sapiens
ccatgtcatggctcgtagctatccc

SEQ ID NO: 12672 - DNA, 25 bp, Homo sapiens
ccgaggcttcaccaaagaggtactt

SEQ ID NO: 12673 - DNA, 25 bp, Homo sapiens
ctatccctctaaccataccatggaa

SEQ ID NO: 12674 - DNA, 25 bp, Homo sapiens
gacaccgctcatgttttacacatag

SEQ ID NO: 12675 - DNA, 25 bp, Homo sapiens
gcctgtttacagattattacggtga

SEQ ID NO: 12676 - DNA, 25 bp, Homo sapiens
tctagaattatcttgcattgcctaa

SEQ ID NO: 12677 - DNA, 25 bp, Homo sapiens
tgtaccaattttaagagcattcccc

SEQ ID NO: 12678 - DNA, 25 bp, Homo sapiens
tgtggtggtgttgccttcaaaaaag

SEQ ID NO: 12679 - DNA, 25 bp, Homo sapiens
ttaggagactgttcatctatgctag

SEQ ID NO: 12680 - DNA, 25 bp, Homo sapiens
tttactggtagtccatgtcatggct

SEQ ID NO: 12681 - DNA, 25 bp, Homo sapiens
aaagttgtgtaggcaccacctctgt

SEQ ID NO: 12682 - DNA, 25 bp, Homo sapiens
aatcagcggcatttagtacatccag

SEQ ID NO: 12683 - DNA, 25 bp, Homo sapiens
aatggccctgtttacggcctatgag

SEQ ID NO: 12684 - DNA, 25 bp, Homo sapiens
cacaggcaatgactgcgcagagtgg

SEQ ID NO: 12685 - DNA, 25 bp, Homo sapiens
cacatggcttcctaaatggccctgt

SEQ ID NO: 12686 - DNA, 25 bp, Homo sapiens
cttcctcttaggatgtttcaccaag

SEQ ID NO: 12687 - DNA, 25 bp, Homo sapiens
gaagtcggccaggtaggatgaacac

SEQ ID NO: 12688 - DNA, 25 bp, Homo sapiens
gagccctaaacacacgcgtgattgg

SEQ ID NO: 12689 - DNA, 25 bp, Homo sapiens
gattttctctaatgtaacttcctct

SEQ ID NO: 12690 - DNA, 25 bp, Homo sapiens
gggagaagcctgggtggctcagcat

SEQ ID NO: 12691 - DNA, 25 bp, Homo sapiens
tgattggtaactgcctggcctggca

SEQ ID NO: 12692 - DNA, 25 bp, Homo sapiens
catgccataccttgtcaagactgtc

SEQ ID NO: 12693 - DNA, 25 bp, Homo sapiens
ctcttctggtcaccaggctgttcag

SEQ ID NO: 12694 - DNA, 25 bp, Homo sapiens
cttgtaatgtcgatggctttgccac

SEQ ID NO: 12695 - DNA, 25 bp, Homo sapiens
gaagaaacaggtcagccctcagatc

SEQ ID NO: 12696 - DNA, 25 bp, Homo sapiens
gaatgtgagagcctgggtgtctgag

SEQ ID NO: 12697 - DNA, 25 bp, Homo sapiens
gcctgggtgtctgagaccgggaggg

SEQ ID NO: 12698 - DNA, 25 bp, Homo sapiens
gctctgccattagctaggacctaag

SEQ ID NO: 12699 - DNA, 25 bp, Homo sapiens
ggactcagttcttcatcttgtaatg

SEQ ID NO: 12700 - DNA, 25 bp, Homo sapiens
ggctgttcagtggactcagttcttc

SEQ ID NO: 12701 - DNA, 25 bp, Homo sapiens
taggtttgtctcagcatgcaagagt

SEQ ID NO: 12702 - DNA, 25 bp, Homo sapiens
ttagctaggacctaagactctgccc

SEQ ID NO: 12703 - DNA, 25 bp, Homo sapiens
agcagaattggctggtttcgcgcct

SEQ ID NO: 12704 - DNA, 25 bp, Homo sapiens
atcctccgaatctggttgggcatcc

SEQ ID NO: 12705 - DNA, 25 bp, Homo sapiens
atgactgggacttagactggggctc

SEQ ID NO: 12706 - DNA, 25 bp, Homo sapiens
catgtacgcccggaagtaggacctc

SEQ ID NO: 12707 - DNA, 25 bp, Homo sapiens
gcacaaagcgggcgctgtcggtggt

SEQ ID NO: 12708 - DNA, 25 bp, Homo sapiens
ggacgcgaagagcaacgggcgctgc

SEQ ID NO: 12709 - DNA, 25 bp, Homo sapiens
tccagcatacggccaatgtcacaac

SEQ ID NO: 12710 - DNA, 25 bp, Homo sapiens
tcggcctcgctctgaaaagtgctta

SEQ ID NO: 12711 - DNA, 25 bp, Homo sapiens
tcttctcagttctccttgcagagga

SEQ ID NO: 12712 - DNA, 25 bp, Homo sapiens
tgggctctagtgactcgagactcaa

SEQ ID NO: 12713 - DNA, 25 bp, Homo sapiens
tgtcggtggtggagtgcgcatgtac

SEQ ID NO: 12714 - DNA, 25 bp, Homo sapiens
aagctctcacatcgataggatccca

SEQ ID NO: 12715 - DNA, 25 bp, Homo sapiens
agaaatgtttctgcctttggggtct

SEQ ID NO: 12716 - DNA, 25 bp, Homo sapiens
agactttgccaaatgccctgggtct

SEQ ID NO: 12717 - DNA, 25 bp, Homo sapiens
atttgcttccgctagtctgagggca

SEQ ID NO: 12718 - DNA, 25 bp, Homo sapiens
caaactcccagtgctgggggtccct

SEQ ID NO: 12719 - DNA, 25 bp, Homo sapiens
ctgagaggggagacctgcccctttc

SEQ ID NO: 12720 - DNA, 25 bp, Homo sapiens
gagggtggcacagatcgcagcacct

SEQ ID NO: 12721 - DNA, 25 bp, Homo sapiens
gctcctccactttcaggtgtaattt

SEQ ID NO: 12722 - DNA, 25 bp, Homo sapiens
taggatcccatgaggatggtcccct

SEQ ID NO: 12723 - DNA, 25 bp, Homo sapiens
tgaaatgggacccctgctgattctt

SEQ ID NO: 12724 - DNA, 25 bp, Homo sapiens
tggtccccttcacctgggagaaaag

SEQ ID NO: 12725 - DNA, 25 bp, Homo sapiens
aaaggacatattcgctgtccccgtg

SEQ ID NO: 12726 - DNA, 25 bp, Homo sapiens
aaggcactttacagcttcatgtttc

SEQ ID NO: 12727 - DNA, 25 bp, Homo sapiens
agtggaggcaggcgtggctgcattc

SEQ ID NO: 12728 - DNA, 25 bp, Homo sapiens
cagacctccagggtgcggaatcaaa

SEQ ID NO: 12729 - DNA, 25 bp, Homo sapiens
cagagactcggcagcttttcctctg

SEQ ID NO: 12730 - DNA, 25 bp, Homo sapiens
cagcttcatgtttcatccactgtca

SEQ ID NO: 12731 - DNA, 25 bp, Homo sapiens
ccagcggcttgtagccgtcactggc

SEQ ID NO: 12732 - DNA, 25 bp, Homo sapiens
ctcttctgttttaccaacttcttgt

SEQ ID NO: 12733 - DNA, 25 bp, Homo sapiens
gcgatgtccctgatgtactgtgcag

SEQ ID NO: 12734 - DNA, 25 bp, Homo sapiens
tatttggaacgcgtgctgtgtcccg

SEQ ID NO: 12735 - DNA, 25 bp, Homo sapiens
tttgtatgtgtgcacctctgaccat

SEQ ID NO: 12736 - DNA, 25 bp, Homo sapiens
caggacatggaggtgccggatgcag

SEQ ID NO: 12737 - DNA, 25 bp, Homo sapiens
ctgcacgcactgtggaatctcggca

SEQ ID NO: 12738 - DNA, 25 bp, Homo sapiens
gacgcagcacaagctcaggacatgg

SEQ ID NO: 12739 - DNA, 25 bp, Homo sapiens
gactgtcttgaacatcccaaatgcc

SEQ ID NO: 12740 - DNA, 25 bp, Homo sapiens
gatccggcagcacaagctgcggaag

SEQ ID NO: 12741 - DNA, 25 bp, Homo sapiens
gatgccttctacacgttggtgcgtg

SEQ ID NO: 12742 - DNA, 25 bp, Homo sapiens
gtacagggagcagatcaaacgggtg

SEQ ID NO: 12743 - DNA, 25 bp, Homo sapiens
gtgaaggactcggatgacgtgccca

SEQ ID NO: 12744 - DNA, 25 bp, Homo sapiens
gttggtgcgtgagatccggcagcac

SEQ ID NO: 12745 - DNA, 25 bp, Homo sapiens
tgagctgcaagtgtgtgctctcctg

SEQ ID NO: 12746 - DNA, 25 bp, Homo sapiens
tttgaggacatccaccagtacaggg

SEQ ID NO: 12747 - DNA, 25 bp, Homo sapiens
aatgtacacgctgcagccagaatgc

SEQ ID NO: 12748 - DNA, 25 bp, Homo sapiens
cagtgtgcacggtcccacactgtgg

SEQ ID NO: 12749 - DNA, 25 bp, Homo sapiens
gaattcacacggtactcagaggcac

SEQ ID NO: 12750 - DNA, 25 bp, Homo sapiens
gagacctgtccataatacccaacag

SEQ ID NO: 12751 - DNA, 25 bp, Homo sapiens
gagttgtcattctcatctatccatg

SEQ ID NO: 12752 - DNA, 25 bp, Homo sapiens
gctgggccagcagaagctaggacat

SEQ ID NO: 12753 - DNA, 25 bp, Homo sapiens
ggcagagtgcggtatattccaggaa

SEQ ID NO: 12754 - DNA, 25 bp, Homo sapiens
gggtgacaatgcacacatgctgggc

SEQ ID NO: 12755 - DNA, 25 bp, Homo sapiens
tactcacttagcttacttctttgtt

SEQ ID NO: 12756 - DNA, 25 bp, Homo sapiens
tgctgcttcccggcaaacatagttt

SEQ ID NO: 12757 - DNA, 25 bp, Homo sapiens
tttggtataacttctttcctgctgc

SEQ ID NO: 12758 - DNA, 25 bp, Homo sapiens
aagacagcctttacaccatttctag

SEQ ID NO: 12759 - DNA, 25 bp, Homo sapiens
agaaggtgtttaagctctcctcgac

SEQ ID NO: 12760 - DNA, 25 bp, Homo sapiens
atcaatccctggttgtagacaagtt

SEQ ID NO: 12761 - DNA, 25 bp, Homo sapiens
atctccttcatatatgggcatgtcc

SEQ ID NO: 12762 - DNA, 25 bp, Homo sapiens
ctctcctcgacctgttggaatggtg

SEQ ID NO: 12763 - DNA, 25 bp, Homo sapiens
ctggcaccactccaacaaacaaacg

SEQ ID NO: 12764 - DNA, 25 bp, Homo sapiens
ggcaatgttatgcaccacttcaatt

SEQ ID NO: 12765 - DNA, 25 bp, Homo sapiens
gtaaacctgcctcacaaaatacatg

SEQ ID NO: 12766 - DNA, 25 bp, Homo sapiens
gtggcacactattttggcaatgtta

SEQ ID NO: 12767 - DNA, 25 bp, Homo sapiens
tgtagtgttgtaaacctgcctcaca

SEQ ID NO: 12768 - DNA, 25 bp, Homo sapiens
ttacaccatttctagtggcacacta

SEQ ID NO: 12769 - DNA, 25 bp, Homo sapiens
atgtgaagtattcatccggccaacc

SEQ ID NO: 12770 - DNA, 25 bp, Homo sapiens
cacggatctcacggaggtcatggag

SEQ ID NO: 12771 - DNA, 25 bp, Homo sapiens
ctccttggcccacgatgttgagtgc

SEQ ID NO: 12772 - DNA, 25 bp, Homo sapiens
cttgctgcccaaatgttcccagcag

SEQ ID NO: 12773 - DNA, 25 bp, Homo sapiens
gcaaatgccaattccaagttccatt

SEQ ID NO: 12774 - DNA, 25 bp, Homo sapiens
gccaaccaatgtttcctgacgtaca

SEQ ID NO: 12775 - DNA, 25 bp, Homo sapiens
ggtcatggagcagattcacagcacg

SEQ ID NO: 12776 - DNA, 25 bp, Homo sapiens
gtgttgcccttttcagcaaatgcca

SEQ ID NO: 12777 - DNA, 25 bp, Homo sapiens
tcacagcacgtttccatcttgctgc

SEQ ID NO: 12778 - DNA, 25 bp, Homo sapiens
ttcccagcaggccacaggcaatgtg

SEQ ID NO: 12779 - DNA, 25 bp, Homo sapiens
tttcctgacgtacagtgttgccctt

SEQ ID NO: 12780 - DNA, 25 bp, Homo sapiens
cagcctgccttgcagaccaatgggc

SEQ ID NO: 12781 - DNA, 25 bp, Homo sapiens
ccctcctagagcgtgtgcagactga

SEQ ID NO: 12782 - DNA, 25 bp, Homo sapiens
cctgctgacctgctgtttggtagag

SEQ ID NO: 12783 - DNA, 25 bp, Homo sapiens
ctccctccctgctggaggaacacgt

SEQ ID NO: 12784 - DNA, 25 bp, Homo sapiens
gtcttagcaggagcgggccctgtac

SEQ ID NO: 12785 - DNA, 25 bp, Homo sapiens
taaatcaagactcacatccctttcc

SEQ ID NO: 12786 - DNA, 25 bp, Homo sapiens
taaggatggctgattccccaagggc

SEQ ID NO: 12787 - DNA, 25 bp, Homo sapiens
tttctcttaactcagcttttgctac

SEQ ID NO: 12788 - DNA, 25 bp, Homo sapiens
atcacacttctaataaaatccacaa

SEQ ID NO: 12789 - DNA, 25 bp, Homo sapiens
cttctccctgagctggtaactgcaa

SEQ ID NO: 12790 - DNA, 25 bp, Homo sapiens
gacaggagggtgtccacatatgtta

SEQ ID NO: 12791 - DNA, 25 bp, Homo sapiens
gatctcctatagaagtttctgctgc

SEQ ID NO: 12792 - DNA, 25 bp, Homo sapiens
gcctttctgactagtatcacacttc

SEQ ID NO: 12793 - DNA, 25 bp, Homo sapiens
ggagggtgtccacatatgttaacat

SEQ ID NO: 12794 - DNA, 25 bp, Homo sapiens
gttaacatcagttggatctcctata

SEQ ID NO: 12795 - DNA, 25 bp, Homo sapiens
tccctgagctggtaactgcaatgcc

SEQ ID NO: 12796 - DNA, 25 bp, Homo sapiens
tgggcctttctgactagtatcacac

SEQ ID NO: 12797 - DNA, 25 bp, Homo sapiens
tggtaactgcaatgccaacttcctg

SEQ ID NO: 12798 - DNA, 25 bp, Homo sapiens
ttctgactagtatcacacttctaat

SEQ ID NO: 12799 - DNA, 25 bp, Homo sapiens
acaccatttggttatatcgcagagg

SEQ ID NO: 12800 - DNA, 25 bp, Homo sapiens
acatcatataagccccaactttgtt

SEQ ID NO: 12801 - DNA, 25 bp, Homo sapiens
acatcccttctgttagggtctttca

SEQ ID NO: 12802 - DNA, 25 bp, Homo sapiens
gattaaacgactgtgtctttgtcac

SEQ ID NO: 12803 - DNA, 25 bp, Homo sapiens
ggacataccacgtttaaatcattaa

SEQ ID NO: 12804 - DNA, 25 bp, Homo sapiens
gtagaggccattcaaccgtcaaaca

SEQ ID NO: 12805 - DNA, 25 bp, Homo sapiens
gtcacctctgcttaactttaggagt

SEQ ID NO: 12806 - DNA, 25 bp, Homo sapiens
gtttgcatgatacgctttgttagaa

SEQ ID NO: 12807 - DNA, 25 bp, Homo sapiens
gtttttccttctgtataagcaccta

SEQ ID NO: 12808 - DNA, 25 bp, Homo sapiens
taaaaattaacctcacatcccttct

SEQ ID NO: 12809 - DNA, 25 bp, Homo sapiens
taacctctaatctccgtttgcatga

SEQ ID NO: 12810 - DNA, 25 bp, Homo sapiens
aaacattttgtcctctaattgttat

SEQ ID NO: 12811 - DNA, 25 bp, Homo sapiens
aatctgtggttatagtagttttctc

SEQ ID NO: 12812 - DNA, 25 bp, Homo sapiens
acttctcagcaaataaatctccctt

SEQ ID NO: 12813 - DNA, 25 bp, Homo sapiens
agctccctgaaaaaccattcctgct

SEQ ID NO: 12814 - DNA, 25 bp, Homo sapiens
gccttggaaggcagctactacagaa

SEQ ID NO: 12815 - DNA, 25 bp, Homo sapiens
gttatgtgtcattggccttttgtga

SEQ ID NO: 12816 - DNA, 25 bp, Homo sapiens
taaagtagtattttcagctccctga

SEQ ID NO: 12817 - DNA, 25 bp, Homo sapiens
tactatctgttgtttaactacttta

SEQ ID NO: 12818 - DNA, 25 bp, Homo sapiens
tcttgatgtttgatgcactgtgttt

SEQ ID NO: 12819 - DNA, 25 bp, Homo sapiens
ttctcaggtttgtttatcttgatgt

SEQ ID NO: 12820 - DNA, 25 bp, Homo sapiens
ttgaattaacagcaactttccacag

SEQ ID NO: 12821 - DNA, 25 bp, Homo sapiens
acaatacggggctgagatccctctc

SEQ ID NO: 12822 - DNA, 25 bp, Homo sapiens
atccctctcagcttctttgagatgt

SEQ ID NO: 12823 - DNA, 25 bp, Homo sapiens
ctctcgggtactaatctttctaata

SEQ ID NO: 12824 - DNA, 25 bp, Homo sapiens
ggacaatcttgatggtgggtcccct

SEQ ID NO: 12825 - DNA, 25 bp, Homo sapiens
ggccaccataagcatcatcgttgta

SEQ ID NO: 12826 - DNA, 25 bp, Homo sapiens
ggcccttgattaggtcagtggtccc

SEQ ID NO: 12827 - DNA, 25 bp, Homo sapiens
ggtccaggcgggcatgtgagtttgt

SEQ ID NO: 12828 - DNA, 25 bp, Homo sapiens
gtggagggtggcgtgtgaaggagga

SEQ ID NO: 12829 - DNA, 25 bp, Homo sapiens
gtggttgtggcacttctgacttgaa

SEQ ID NO: 12830 - DNA, 25 bp, Homo sapiens
ttctgcctcccaagtgacaatacgg

SEQ ID NO: 12831 - DNA, 25 bp, Homo sapiens
tttttcattaccttcagtattcctg

SEQ ID NO: 12832 - DNA, 25 bp, Homo sapiens
aagcaaatgcattctatcgttatta

SEQ ID NO: 12833 - DNA, 25 bp, Homo sapiens
aaggtcttacattgcctgactaaaa

SEQ ID NO: 12834 - DNA, 25 bp, Homo sapiens
acaattctccctatcttgtgaagtt

SEQ ID NO: 12835 - DNA, 25 bp, Homo sapiens
agctctatttacttctaatcttaaa

SEQ ID NO: 12836 - DNA, 25 bp, Homo sapiens
atattgtattgctgctgtgcgtgga

SEQ ID NO: 12837 - DNA, 25 bp, Homo sapiens
atttacctctaaatttccatatcct

SEQ ID NO: 12838 - DNA, 25 bp, Homo sapiens
gcctaggaggactggggtaagcgga

SEQ ID NO: 12839 - DNA, 25 bp, Homo sapiens
gggagacattgtttggatttccttt

SEQ ID NO: 12840 - DNA, 25 bp, Homo sapiens
tgtgacaagcacaccacaattctcc

SEQ ID NO: 12841 - DNA, 25 bp, Homo sapiens
ttaccactggtaacatgtgacaagc

SEQ ID NO: 12842 - DNA, 25 bp, Homo sapiens
tttccatatccttctggctgtagat

SEQ ID NO: 12843 - DNA, 25 bp, Homo sapiens
aacatgggggcccattttggcggct

SEQ ID NO: 12844 - DNA, 25 bp, Homo sapiens
aacgcgaacgtcaggctaagctggc

SEQ ID NO: 12845 - DNA, 25 bp, Homo sapiens
agaagcctctggacattgactacat

SEQ ID NO: 12846 - DNA, 25 bp, Homo sapiens
agccgagcaacagcgcttcagaact

SEQ ID NO: 12847 - DNA, 25 bp, Homo sapiens
gagcggcgccggtcagagagagccg

SEQ ID NO: 12848 - DNA, 25 bp, Homo sapiens
gatcaacgtgctgtacaaccgcatc

SEQ ID NO: 12849 - DNA, 25 bp, Homo sapiens
gcatcctctccgagcgtaagaagcc

SEQ ID NO: 12850 - DNA, 25 bp, Homo sapiens
gccacgcccagaagttccggaaggg

SEQ ID NO: 12851 - DNA, 25 bp, Homo sapiens
ggactggatccaccagctggagtct

SEQ ID NO: 12852 - DNA, 25 bp, Homo sapiens
gggagatgaaggtgcgcatcctctc

SEQ ID NO: 12853 - DNA, 25 bp, Homo sapiens
gtagcttgaaataaacgctcccctc

SEQ ID NO: 12854 - DNA, 25 bp, Homo sapiens
acaagaggccttcctttctaatgac

SEQ ID NO: 12855 - DNA, 25 bp, Homo sapiens
atctgacagctaaagccaagccaca

SEQ ID NO: 12856 - DNA, 25 bp, Homo sapiens
gaatcattcaagtccccaaatttca

SEQ ID NO: 12857 - DNA, 25 bp, Homo sapiens
gccagccctgatgcaacatttggct

SEQ ID NO: 12858 - DNA, 25 bp, Homo sapiens
gctggttcactgtaactagcaggcc

SEQ ID NO: 12859 - DNA, 25 bp, Homo sapiens
gctgtttagcttgactgttttcctc

SEQ ID NO: 12860 - DNA, 25 bp, Homo sapiens
ggaagcaaagccttggtgcctgtga

SEQ ID NO: 12861 - DNA, 25 bp, Homo sapiens
tgatcagctcatcctttaccataaa

SEQ ID NO: 12862 - DNA, 25 bp, Homo sapiens
tggctgacaactacaaacactggaa

SEQ ID NO: 12863 - DNA, 25 bp, Homo sapiens
tgtacccttgtcaatccatggagct

SEQ ID NO: 12864 - DNA, 25 bp, Homo sapiens
acatcagaaccaaactacttctcca

SEQ ID NO: 12865 - DNA, 25 bp, Homo sapiens
acttggccctgcaagcttaggatga

SEQ ID NO: 12866 - DNA, 25 bp, Homo sapiens
agaaccacttagtgtcccattctac

SEQ ID NO: 12867 - DNA, 25 bp, Homo sapiens
catctcccactagatcctgtattat

SEQ ID NO: 12868 - DNA, 25 bp, Homo sapiens
cctggtgacccacctggaatgggaa

SEQ ID NO: 12869 - DNA, 25 bp, Homo sapiens
gatcctgtattatccatctacatca

SEQ ID NO: 12870 - DNA, 25 bp, Homo sapiens
ggaaggatgtcagctgacctctcac

SEQ ID NO: 12871 - DNA, 25 bp, Homo sapiens
ggggctcatcttactagtatcccct

SEQ ID NO: 12872 - DNA, 25 bp, Homo sapiens
gtagctacttcttgatttgggcctg

SEQ ID NO: 12873 - DNA, 25 bp, Homo sapiens
tattggggtcacatatgtcccttcc

SEQ ID NO: 12874 - DNA, 25 bp, Homo sapiens
tccctcttatccatctgcaggtgaa

SEQ ID NO: 12875 - DNA, 25 bp, Homo sapiens
acatcgtcttcaccatcaatggagt

SEQ ID NO: 12876 - DNA, 25 bp, Homo sapiens
atggcgacatggtggtcagctgctc

SEQ ID NO: 12877 - DNA, 25 bp, Homo sapiens
cagccacctcccaggaagatctggc

SEQ ID NO: 12878 - DNA, 25 bp, Homo sapiens
catccagagcgacatcggagccagc

SEQ ID NO: 12879 - DNA, 25 bp, Homo sapiens
ccatgaacggagaggccatcgcctg

SEQ ID NO: 12880 - DNA, 25 bp, Homo sapiens
cgaggggagctgcatcagtggcttc

SEQ ID NO: 12881 - DNA, 25 bp, Homo sapiens
tactttaccgtcttcgacagggcaa

SEQ ID NO: 12882 - DNA, 25 bp, Homo sapiens
tatctaattctcctgactgttcttc

SEQ ID NO: 12883 - DNA, 25 bp, Homo sapiens
tcctgtgcccactttagatgtatct

SEQ ID NO: 12884 - DNA, 25 bp, Homo sapiens
tgccaggccattgttgacaccggca

SEQ ID NO: 12885 - DNA, 25 bp, Homo sapiens
tgcctacatcctgcagagcgagggg

SEQ ID NO: 12886 - DNA, 25 bp, Homo sapiens
acagggcaagcccgagcatggtggg

SEQ ID NO: 12887 - DNA, 25 bp, Homo sapiens
actcagagtggacaccatcttccgt

SEQ ID NO: 12888 - DNA, 25 bp, Homo sapiens
ctgcccactttcaattcacattgtt

SEQ ID NO: 12889 - DNA, 25 bp, Homo sapiens
ctgtccaccgatgaacactcagagt

SEQ ID NO: 12890 - DNA, 25 bp, Homo sapiens
gctgcagggtgggtctgaagccagg

SEQ ID NO: 12891 - DNA, 25 bp, Homo sapiens
ggagctgcctgtctgggataatttg

SEQ ID NO: 12892 - DNA, 25 bp, Homo sapiens
taaactccaaggggactgtccaccg

SEQ ID NO: 12893 - DNA, 25 bp, Homo sapiens
tcaccacggacagcacgtggcccag

SEQ ID NO: 12894 - DNA, 25 bp, Homo sapiens
tgtccccatccatgaacacagggta

SEQ ID NO: 12895 - DNA, 25 bp, Homo sapiens
ttatcttcccctacaaatcaagcca

SEQ ID NO: 12896 - DNA, 25 bp, Homo sapiens
ttgggtgggggtggtcacaagccct

SEQ ID NO: 12897 - DNA, 25 bp, Homo sapiens
aagctgttcttcttgtataccagaa

SEQ ID NO: 12898 - DNA, 25 bp, Homo sapiens
acagcacttttcttcattatactgc

SEQ ID NO: 12899 - DNA, 25 bp, Homo sapiens
actctttcctcataactttgcatat

SEQ ID NO: 12900 - DNA, 25 bp, Homo sapiens
atactgctaatttcattacactgta

SEQ ID NO: 12901 - DNA, 25 bp, Homo sapiens
atatccatctttcagaacccaaatt

SEQ ID NO: 12902 - DNA, 25 bp, Homo sapiens
gattatacagtaactctttcctcat

SEQ ID NO: 12903 - DNA, 25 bp, Homo sapiens
gcattttatgtatccattcatcagc

SEQ ID NO: 12904 - DNA, 25 bp, Homo sapiens
gtacctaattgttcttaccagtttg

SEQ ID NO: 12905 - DNA, 25 bp, Homo sapiens
gtttgtcttagagctcagtcattcc

SEQ ID NO: 12906 - DNA, 25 bp, Homo sapiens
tccaacatctcccactcaaaatgaa

SEQ ID NO: 12907 - DNA, 25 bp, Homo sapiens
tccctagtactcccattgtttagta

SEQ ID NO: 12908 - DNA, 25 bp, Homo sapiens
aagggatatgacttcctactaagga

SEQ ID NO: 12909 - DNA, 25 bp, Homo sapiens
ggcaagccgaaaccacttggctctg

SEQ ID NO: 12910 - DNA, 25 bp, Homo sapiens
ggctactgtaaacatggctggtgga

SEQ ID NO: 12911 - DNA, 25 bp, Homo sapiens
ggctctggaaatctaagttcatact

SEQ ID NO: 12912 - DNA, 25 bp, Homo sapiens
gtgttttcacacgtctttttatagt

SEQ ID NO: 12913 - DNA, 25 bp, Homo sapiens
gtttaccacaacaattctgactaca

SEQ ID NO: 12914 - DNA, 25 bp, Homo sapiens
taagctagttttctgaggtgttttc

SEQ ID NO: 12915 - DNA, 25 bp, Homo sapiens
tgacaacccccagaattaaatgaac

SEQ ID NO: 12916 - DNA, 25 bp, Homo sapiens
tggtttaattaagctctctcctgac

SEQ ID NO: 12917 - DNA, 25 bp, Homo sapiens
ttatagttacttcatcttagatttt

SEQ ID NO: 12918 - DNA, 25 bp, Homo sapiens
ttgaggaggatatttggctactgta

SEQ ID NO: 12919 - DNA, 25 bp, Homo sapiens
aatccaactgcaatgtcttttcctt

SEQ ID NO: 12920 - DNA, 25 bp, Homo sapiens
acctggacagtcccaagggctatgc

SEQ ID NO: 12921 - DNA, 25 bp, Homo sapiens
cacagggaggtttgacctcttccct

SEQ ID NO: 12922 - DNA, 25 bp, Homo sapiens
gaatgactattttacgtggagcatc

SEQ ID NO: 12923 - DNA, 25 bp, Homo sapiens
gagcctttcacaccaagatttctat

SEQ ID NO: 12924 - DNA, 25 bp, Homo sapiens
gcagatggactccattggcacaggg

SEQ ID NO: 12925 - DNA, 25 bp, Homo sapiens
gtaaactcaccagtcttgctttgga

SEQ ID NO: 12926 - DNA, 25 bp, Homo sapiens
gtcacttggttatatttatcttagc

SEQ ID NO: 12927 - DNA, 25 bp, Homo sapiens
gtggagcatcattgtgtgactgttg

SEQ ID NO: 12928 - DNA, 25 bp, Homo sapiens
tatcttagcatgagcctttcacacc

SEQ ID NO: 12929 - DNA, 25 bp, Homo sapiens
tattactacagttccagtcacttgg

SEQ ID NO: 12930 - DNA, 25 bp, Homo sapiens
aggtttcccactgcggaacaggagt

SEQ ID NO: 12931 - DNA, 25 bp, Homo sapiens
cccaaacaagcgccaccgtgggaga

SEQ ID NO: 12932 - DNA, 25 bp, Homo sapiens
ctggctgccaagataccttcatggt

SEQ ID NO: 12933 - DNA, 25 bp, Homo sapiens
gaactgtctctttcagtctacattt

SEQ ID NO: 12934 - DNA, 25 bp, Homo sapiens
gcagctttgaggctggcggggtctg

SEQ ID NO: 12935 - DNA, 25 bp, Homo sapiens
gctgctcctagaggggacaagccag

SEQ ID NO: 12936 - DNA, 25 bp, Homo sapiens
gctgtcactggtaccggatgcagac

SEQ ID NO: 12937 - DNA, 25 bp, Homo sapiens
ggaacaggagtgactctggctgcca

SEQ ID NO: 12938 - DNA, 25 bp, Homo sapiens
ggcacttggagcgtttttgctggct

SEQ ID NO: 12939 - DNA, 25 bp, Homo sapiens
gggccgggcaaacactttggccaca

SEQ ID NO: 12940 - DNA, 25 bp, Homo sapiens
tggcttgcactttcttattttctta

SEQ ID NO: 12941 - DNA, 25 bp, Homo sapiens
aatagagcctcgtctggcaagtcgg

SEQ ID NO: 12942 - DNA, 25 bp, Homo sapiens
acggagggagtggcacttctgcctt

SEQ ID NO: 12943 - DNA, 25 bp, Homo sapiens
caaggtggcatccgaaggtgtctct

SEQ ID NO: 12944 - DNA, 25 bp, Homo sapiens
ctgcagcagccggaatagagcctcg

SEQ ID NO: 12945 - DNA, 25 bp, Homo sapiens
ggagcatcggagggagtcccagagc

SEQ ID NO: 12946 - DNA, 25 bp, Homo sapiens
ggatcaggctgctggaaacacagtc

SEQ ID NO: 12947 - DNA, 25 bp, Homo sapiens
ggtccctgcagaagccagaaggtgc

SEQ ID NO: 12948 - DNA, 25 bp, Homo sapiens
tcccagccgtggtcaacggagggag

SEQ ID NO: 12949 - DNA, 25 bp, Homo sapiens
tccctgggcctcaacaaggatcagg

SEQ ID NO: 12950 - DNA, 25 bp, Homo sapiens
tctggtcttccagcgaggtgggaga

SEQ ID NO: 12951 - DNA, 25 bp, Homo sapiens
ttgggcctagaccgcgtgataaaac

SEQ ID NO: 12952 - DNA, 25 bp, Homo sapiens
ggtgctgacccaggctgagtgtaaa

SEQ ID NO: 12953 - DNA, 25 bp, Homo sapiens
taaagcctcctaccctggaaagatt

SEQ ID NO: 12954 - DNA, 25 bp, Homo sapiens
aaacatttaactccatgccagacct

SEQ ID NO: 12955 - DNA, 25 bp, Homo sapiens
cattccaatttgttctttcccgtgg

SEQ ID NO: 12956 - DNA, 25 bp, Homo sapiens
cttgagctgagcatcagtcgcctgt

SEQ ID NO: 12957 - DNA, 25 bp, Homo sapiens
gatgcgtatctgagggtgtcacaca

SEQ ID NO: 12958 - DNA, 25 bp, Homo sapiens
gcagggaagacttctgggccatgga

SEQ ID NO: 12959 - DNA, 25 bp, Homo sapiens
gcattaaccaactttgtcagtgaca

SEQ ID NO: 12960 - DNA, 25 bp, Homo sapiens
ggacttataaactgactgcatgagc

SEQ ID NO: 12961 - DNA, 25 bp, Homo sapiens
ggagggccgtctaatacatggactt

SEQ ID NO: 12962 - DNA, 25 bp, Homo sapiens
tctgagggtgtcacacacgaccttc

SEQ ID NO: 12963 - DNA, 25 bp, Homo sapiens
tgatcttttttccattggttaaaca

SEQ ID NO: 12964 - DNA, 25 bp, Homo sapiens
tgttctttccttttttgcgagttat

SEQ ID NO: 12965 - DNA, 25 bp, Homo sapiens
agccctcacctcaaagggctggcct

SEQ ID NO: 12966 - DNA, 25 bp, Homo sapiens
aggcacttctgaaagtcaatccctg

SEQ ID NO: 12967 - DNA, 25 bp, Homo sapiens
atgtccaattggtattcagcactat

SEQ ID NO: 12968 - DNA, 25 bp, Homo sapiens
ccctggacaaggcagtcatcacata

SEQ ID NO: 12969 - DNA, 25 bp, Homo sapiens
gcttctcagcctacattcatttgca

SEQ ID NO: 12970 - DNA, 25 bp, Homo sapiens
ggacacattctgaaatcccttttgt

SEQ ID NO: 12971 - DNA, 25 bp, Homo sapiens
ggaccatctggtgttcacaggtgtt

SEQ ID NO: 12972 - DNA, 25 bp, Homo sapiens
ggccagagatgagaaccctttgaaa

SEQ ID NO: 12973 - DNA, 25 bp, Homo sapiens
gttaggggctagttttggatttgat

SEQ ID NO: 12974 - DNA, 25 bp, Homo sapiens
tatgggtcagttacagcagccctca

SEQ ID NO: 12975 - DNA, 25 bp, Homo sapiens
ttgcaagcttcaatctctggaccat

SEQ ID NO: 12976 - DNA, 25 bp, Homo sapiens
aaagccagatagcctcgagctcaaa

SEQ ID NO: 12977 - DNA, 25 bp, Homo sapiens
agataagactggacaggggctccca

SEQ ID NO: 12978 - DNA, 25 bp, Homo sapiens
atagaagtagagttccacccagggc

SEQ ID NO: 12979 - DNA, 25 bp, Homo sapiens
atctacctcgtgctagagtctgagt

SEQ ID NO: 12980 - DNA, 25 bp, Homo sapiens
cagacacagcagtggtgccaacgtg

SEQ ID NO: 12981 - DNA, 25 bp, Homo sapiens
cctagtctatcacccaacacagata

SEQ ID NO: 12982 - DNA, 25 bp, Homo sapiens
gcaggttaagccccaaatgtaactg

SEQ ID NO: 12983 - DNA, 25 bp, Homo sapiens
gggggttatggatccagggtggcta

SEQ ID NO: 12984 - DNA, 25 bp, Homo sapiens
gtctgagtagcctagtctatcaccc

SEQ ID NO: 12985 - DNA, 25 bp, Homo sapiens
tgccaacgtgaatctacctcgtgct

SEQ ID NO: 12986 - DNA, 25 bp, Homo sapiens
tgccttcctactcagggggttatgg

SEQ ID NO: 12987 - DNA, 25 bp, Homo sapiens
atctcaaggtggatcagcttcctgg

SEQ ID NO: 12988 - DNA, 25 bp, Homo sapiens
cgtcactgtagaaggccccgtagaa

SEQ ID NO: 12989 - DNA, 25 bp, Homo sapiens
gagatcctttcgaagtcatcgtctt

SEQ ID NO: 12990 - DNA, 25 bp, Homo sapiens
gagttgcattcgtgcaggacctgca

SEQ ID NO: 12991 - DNA, 25 bp, Homo sapiens
gcagctcgcggatgatctggttccg

SEQ ID NO: 12992 - DNA, 25 bp, Homo sapiens
gcgccctcgctggtaggggatgggc

SEQ ID NO: 12993 - DNA, 25 bp, Homo sapiens
ggccctcggcgatggtagggttgat

SEQ ID NO: 12994 - DNA, 25 bp, Homo sapiens
gttccatgcaaatgctgatctcccc

SEQ ID NO: 12995 - DNA, 25 bp, Homo sapiens
tgatgaggcccgagggtctgtgctg

SEQ ID NO: 12996 - DNA, 25 bp, Homo sapiens
ttccggatggccggcttgatctcaa

SEQ ID NO: 12997 - DNA, 25 bp, Homo sapiens
ttctgctgctcgtcaagttccagct

SEQ ID NO: 12998 - DNA, 25 bp, Homo sapiens
aacacaatccgttgcaaacccaaag

SEQ ID NO: 12999 - DNA, 25 bp, Homo sapiens
aactggtgtgagtcaaatgccccct

SEQ ID NO: 13000 - DNA, 25 bp, Homo sapiens
aatctcagtcactctaggactctgc

SEQ ID NO: 13001 - DNA, 25 bp, Homo sapiens
aggactctgcactgaatggctgacc

SEQ ID NO: 13002 - DNA, 25 bp, Homo sapiens
ctcccctctctttctaagagacctg

SEQ ID NO: 13003 - DNA, 25 bp, Homo sapiens
gacccaagtactttccaatctcagt

SEQ ID NO: 13004 - DNA, 25 bp, Homo sapiens
gtctgcttcttgtaaaaacctgaac

SEQ ID NO: 13005 - DNA, 25 bp, Homo sapiens
gtgctattctgtgtcaaacacctct

SEQ ID NO: 13006 - DNA, 25 bp, Homo sapiens
gtgtcctacacaatggtgctattct

SEQ ID NO: 13007 - DNA, 25 bp, Homo sapiens
tgaatggctgacctgacctgatgtc

SEQ ID NO: 13008 - DNA, 25 bp, Homo sapiens
ttcaggtgccgggcgcaggaactgt

SEQ ID NO: 13009 - DNA, 25 bp, Homo sapiens
aagccttcagagggtttggaccaca

SEQ ID NO: 13010 - DNA, 25 bp, Homo sapiens
agaagcaaacaatggtgtctctttt

SEQ ID NO: 13011 - DNA, 25 bp, Homo sapiens
atagcatttgccacttagtatttta

SEQ ID NO: 13012 - DNA, 25 bp, Homo sapiens
caatggtgtctcttttatgttcagc

SEQ ID NO: 13013 - DNA, 25 bp, Homo sapiens
cattgttctgaatgctgcttccatt

SEQ ID NO: 13014 - DNA, 25 bp, Homo sapiens
ccatttgacaaagtgccgtgataat

SEQ ID NO: 13015 - DNA, 25 bp, Homo sapiens
gcacacagagatttgagaaccattg

SEQ ID NO: 13016 - DNA, 25 bp, Homo sapiens
gccacttagaatagcatttgccact

SEQ ID NO: 13017 - DNA, 25 bp, Homo sapiens
ggtttggaccacatctctttggaaa

SEQ ID NO: 13018 - DNA, 25 bp, Homo sapiens
gtaatagattgttttgccacttaga

SEQ ID NO: 13019 - DNA, 25 bp, Homo sapiens
gttggagtatttattgtcagttttg

SEQ ID NO: 13020 - DNA, 25 bp, Homo sapiens
agtgctgctatatctatccattttt

SEQ ID NO: 13021 - DNA, 25 bp, Homo sapiens
ccctctccacattatcagttgacag

SEQ ID NO: 13022 - DNA, 25 bp, Homo sapiens
ctcaccccgccacagagcggtaaga

SEQ ID NO: 13023 - DNA, 25 bp, Homo sapiens
ctgggctccgttgtaccaagtggag

SEQ ID NO: 13024 - DNA, 25 bp, Homo sapiens
gcaagcgttgtgcagagcccatagc

SEQ ID NO: 13025 - DNA, 25 bp, Homo sapiens
gcagcgggccggaaatggcgtgacc

SEQ ID NO: 13026 - DNA, 25 bp, Homo sapiens
gctacttgacctaagggactcccac

SEQ ID NO: 13027 - DNA, 25 bp, Homo sapiens
ggagcaggtggttgcgggcaagcgt

SEQ ID NO: 13028 - DNA, 25 bp, Homo sapiens
gttgacagtgtacaatgcctttgat

SEQ ID NO: 13029 - DNA, 25 bp, Homo sapiens
tccaccaaagacagttgcgcgcctg

SEQ ID NO: 13030 - DNA, 25 bp, Homo sapiens
tgctcccgatgctgctatggaaggt

SEQ ID NO: 13031 - DNA, 25 bp, Homo sapiens
aaaaaaatctgatcattcctcagtg

SEQ ID NO: 13032 - DNA, 25 bp, Homo sapiens
aaagagctcataccagctcctaagc

SEQ ID NO: 13033 - DNA, 25 bp, Homo sapiens
gaagaggcctggtcctctaatgcct

SEQ ID NO: 13034 - DNA, 25 bp, Homo sapiens
gagagacgctccattgtgaataaag

SEQ ID NO: 13035 - DNA, 25 bp, Homo sapiens
gagggggcagaaatattggggatag

SEQ ID NO: 13036 - DNA, 25 bp, Homo sapiens
gatagggttgggtcagggcttaggg

SEQ ID NO: 13037 - DNA, 25 bp, Homo sapiens
gatgtactaaccattcgtgattatt

SEQ ID NO: 13038 - DNA, 25 bp, Homo sapiens
gtgtgggctgcttagctagacagca

SEQ ID NO: 13039 - DNA, 25 bp, Homo sapiens
gtttccatttcagttgttctttgag

SEQ ID NO: 13040 - DNA, 25 bp, Homo sapiens
taccagctcctaagccctattaaga

SEQ ID NO: 13041 - DNA, 25 bp, Homo sapiens
tctaatgccttgtttccatttcagt

SEQ ID NO: 13042 - DNA, 25 bp, Homo sapiens
aatagctcttgtacagggtatcaga

SEQ ID NO: 13043 - DNA, 25 bp, Homo sapiens
agtgccgatctatgaaccagtgtac

SEQ ID NO: 13044 - DNA, 25 bp, Homo sapiens
attgtgccttttggtgccaggttca

SEQ ID NO: 13045 - DNA, 25 bp, Homo sapiens
ccaagccttccattcctaagtggga

SEQ ID NO: 13046 - DNA, 25 bp, Homo sapiens
gccttccattcctaagtgggattgg

SEQ ID NO: 13047 - DNA, 25 bp, Homo sapiens
gctcagttttgcccatccatatggc

SEQ ID NO: 13048 - DNA, 25 bp, Homo sapiens
ggcagcatctctaatagctcttgta

SEQ ID NO: 13049 - DNA, 25 bp, Homo sapiens
gggtatcagatattgtgccttttgg

SEQ ID NO: 13050 - DNA, 25 bp, Homo sapiens
gtgggattggctcagttttgcccat

SEQ ID NO: 13051 - DNA, 25 bp, Homo sapiens
gttcaaagtcaagtgccgatctatg

SEQ ID NO: 13052 - DNA, 25 bp, Homo sapiens
tgcccatccatatggcagcatctct

SEQ ID NO: 13053 - DNA, 25 bp, Homo sapiens
aatgccctgggatagcaatgcacta

SEQ ID NO: 13054 - DNA, 25 bp, Homo sapiens
agatcgcgtggttctatgttatcac

SEQ ID NO: 13055 - DNA, 25 bp, Homo sapiens
aggaagcctttctagtgctttagaa

SEQ ID NO: 13056 - DNA, 25 bp, Homo sapiens
agtgttccagcacagaatacagcca

SEQ ID NO: 13057 - DNA, 25 bp, Homo sapiens
gaaggcagcaaggggtaaccatctt

SEQ ID NO: 13058 - DNA, 25 bp, Homo sapiens
gaataatgtggttcttatgcaggaa

SEQ ID NO: 13059 - DNA, 25 bp, Homo sapiens
gatgtcacagatggaagtcaaggga

SEQ ID NO: 13060 - DNA, 25 bp, Homo sapiens
gccagtgcaaatgccctgggatagc

SEQ ID NO: 13061 - DNA, 25 bp, Homo sapiens
gggaagtggcaagagcacatggaag

SEQ ID NO: 13062 - DNA, 25 bp, Homo sapiens
gtgagaagccagatcgcgtggttct

SEQ ID NO: 13063 - DNA, 25 bp, Homo sapiens
taaccatcttgaccttctgtttttt

SEQ ID NO: 13064 - DNA, 25 bp, Homo sapiens
aactatgatcctttgaagctcaccc

SEQ ID NO: 13065 - DNA, 25 bp, Homo sapiens
aagggcatgatcttcctatgtcctt

SEQ ID NO: 13066 - DNA, 25 bp, Homo sapiens
agcacccccaaaggtaggcattctc

SEQ ID NO: 13067 - DNA, 25 bp, Homo sapiens
attatttgagttgttcagcaccccc

SEQ ID NO: 13068 - DNA, 25 bp, Homo sapiens
ccccttggagagcctacagaacctc

SEQ ID NO: 13069 - DNA, 25 bp, Homo sapiens
ctgatggccattcttacttagtttc

SEQ ID NO: 13070 - DNA, 25 bp, Homo sapiens
ggcaaaaatgcccttcgagtgaatc

SEQ ID NO: 13071 - DNA, 25 bp, Homo sapiens
ggtagctttaggctgaggcacgggc

SEQ ID NO: 13072 - DNA, 25 bp, Homo sapiens
tattctgattgctacctgatggcca

SEQ ID NO: 13073 - DNA, 25 bp, Homo sapiens
tgaagactgccaaacagcccagaag

SEQ ID NO: 13074 - DNA, 25 bp, Homo sapiens
tttcatttccattttatcgccaaac

SEQ ID NO: 13075 - DNA, 25 bp, Homo sapiens
accttaacagtcgaattcctcttga

SEQ ID NO: 13076 - DNA, 25 bp, Homo sapiens
cagggcagataagccgtggacccgc

SEQ ID NO: 13077 - DNA, 25 bp, Homo sapiens
catccgcttcagtgactacgtggag

SEQ ID NO: 13078 - DNA, 25 bp, Homo sapiens
ctcagtcaaaggcccacggtggaag

SEQ ID NO: 13079 - DNA, 25 bp, Homo sapiens
ctgacgctcaggactatgaccgcag

SEQ ID NO: 13080 - DNA, 25 bp, Homo sapiens
gaaagaaagatcctcatccgcttca

SEQ ID NO: 13081 - DNA, 25 bp, Homo sapiens
gactgtctcatgtatctgcaagggc

SEQ ID NO: 13082 - DNA, 25 bp, Homo sapiens
gattttttccgtaggcggctgagcc

SEQ ID NO: 13083 - DNA, 25 bp, Homo sapiens
ggaggctaacccgaaagctcagtca

SEQ ID NO: 13084 - DNA, 25 bp, Homo sapiens
gtgctggtatttattcacttcccca

SEQ ID NO: 13085 - DNA, 25 bp, Homo sapiens
tcctcttgagtgctatgctgtcttc

SEQ ID NO: 13086 - DNA, 25 bp, Homo sapiens
agctatgtaacagaccatggcccca

SEQ ID NO: 13087 - DNA, 25 bp, Homo sapiens
ccaccccagaggttgatggcgctga

SEQ ID NO: 13088 - DNA, 25 bp, Homo sapiens
ccagccacctacacgtgtgtggtca

SEQ ID NO: 13089 - DNA, 25 bp, Homo sapiens
cccaacatcctcctgatgtggctgg

SEQ ID NO: 13090 - DNA, 25 bp, Homo sapiens
cctcgtggctcctgtgtgaggtgtc

SEQ ID NO: 13091 - DNA, 25 bp, Homo sapiens
cgagctcacagtacaaccacaataa

SEQ ID NO: 13092 - DNA, 25 bp, Homo sapiens
gaaatgatcccggaccagatccgtc

SEQ ID NO: 13093 - DNA, 25 bp, Homo sapiens
gaggtgaacacttctgggtttgccc

SEQ ID NO: 13094 - DNA, 25 bp, Homo sapiens
ggagcctagaagtcagctatgtaac

SEQ ID NO: 13095 - DNA, 25 bp, Homo sapiens
gtgtgtggtcagccacgaggactcc

SEQ ID NO: 13096 - DNA, 25 bp, Homo sapiens
tgatggcgctgagagaacccgctgc

SEQ ID NO: 13097 - DNA, 25 bp, Homo sapiens
aagtcagttgtcctgatcttctctt

SEQ ID NO: 13098 - DNA, 25 bp, Homo sapiens
agtgatgtaccttctgatgcagtct

SEQ ID NO: 13099 - DNA, 25 bp, Homo sapiens
atgacctatatccccataagaactg

SEQ ID NO: 13100 - DNA, 25 bp, Homo sapiens
catcctgcccattatagctacactc

SEQ ID NO: 13101 - DNA, 25 bp, Homo sapiens
ccagctgcagatgaggagtcctctc

SEQ ID NO: 13102 - DNA, 25 bp, Homo sapiens
gaaactcagtctaggtccagctgca

SEQ ID NO: 13103 - DNA, 25 bp, Homo sapiens
gctacactcaggagttctcatctga

SEQ ID NO: 13104 - DNA, 25 bp, Homo sapiens
ggtatctgagtctgccataattctg

SEQ ID NO: 13105 - DNA, 25 bp, Homo sapiens
tgcgaatgtcctttttagttcccgt

SEQ ID NO: 13106 - DNA, 25 bp, Homo sapiens
ttctcatcaatacctgttccactga

SEQ ID NO: 13107 - DNA, 25 bp, Homo sapiens
ttctcttgcagtgtccctgaatggc

SEQ ID NO: 13108 - DNA, 25 bp, Homo sapiens
aatttctcggacacttctcagtgtg

SEQ ID NO: 13109 - DNA, 25 bp, Homo sapiens
agagccctgagatagcggggatcct

SEQ ID NO: 13110 - DNA, 25 bp, Homo sapiens
caccctgtttgggctggtgagctgg

SEQ ID NO: 13111 - DNA, 25 bp, Homo sapiens
ctcagtgtgtggaagctcatgtggg

SEQ ID NO: 13112 - DNA, 25 bp, Homo sapiens
ctgcaccctgtttgggctggtgagc

SEQ ID NO: 13113 - DNA, 25 bp, Homo sapiens
gagatagcggggatcctgaactgga

SEQ ID NO: 13114 - DNA, 25 bp, Homo sapiens
gcggggatcctgaactggactgaat

SEQ ID NO: 13115 - DNA, 25 bp, Homo sapiens
ggactgaataaaacgtggtctccca

SEQ ID NO: 13116 - DNA, 25 bp, Homo sapiens
ggctcatgcctgggaagtgttgtgg

SEQ ID NO: 13117 - DNA, 25 bp, Homo sapiens
tctcggacacttctcagtgtgtgga

SEQ ID NO: 13118 - DNA, 25 bp, Homo sapiens
tggtgagctgggagttcaggtgggc

SEQ ID NO: 13119 - DNA, 25 bp, Homo sapiens
aattctcataggcaccgtatttcac

SEQ ID NO: 13120 - DNA, 25 bp, Homo sapiens
cagggtgagcaccgtgtatgccaac

SEQ ID NO: 13121 - DNA, 25 bp, Homo sapiens
ctctgtggcttctgtgtaccatggg

SEQ ID NO: 13122 - DNA, 25 bp, Homo sapiens
gaacagttctatgccaccagagacc

SEQ ID NO: 13123 - DNA, 25 bp, Homo sapiens
gactgtcgatcctgccacaggagac

SEQ ID NO: 13124 - DNA, 25 bp, Homo sapiens
gatgccatcctaatcctatgaagct

SEQ ID NO: 13125 - DNA, 25 bp, Homo sapiens
ggacttatgttcttttctacagccc

SEQ ID NO: 13126 - DNA, 25 bp, Homo sapiens
gtgccaatgggatcacagtctcagc

SEQ ID NO: 13127 - DNA, 25 bp, Homo sapiens
tcttggatcttcgctggacttatgt

SEQ ID NO: 13128 - DNA, 25 bp, Homo sapiens
tgaactataaccctgaggaccctcc

SEQ ID NO: 13129 - DNA, 25 bp, Homo sapiens
tgccaccagagaccactattttacc

SEQ ID NO: 13130 - DNA, 25 bp, Homo sapiens
aagtgcagccagctcaatcaattcc

SEQ ID NO: 13131 - DNA, 25 bp, Homo sapiens
aatggcgtgtaactcgccgcagtct

SEQ ID NO: 13132 - DNA, 25 bp, Homo sapiens
ccgcagtctccagcggtgtgggagc

SEQ ID NO: 13133 - DNA, 25 bp, Homo sapiens
ctccagcgacccaatggcgtgtaac

SEQ ID NO: 13134 - DNA, 25 bp, Homo sapiens
gcatcctggtacacaagtgcagcca

SEQ ID NO: 13135 - DNA, 25 bp, Homo sapiens
gcctccgggacactctattagatgg

SEQ ID NO: 13136 - DNA, 25 bp, Homo sapiens
ggactttttttgcgcaactgtggac

SEQ ID NO: 13137 - DNA, 25 bp, Homo sapiens
tacctggagaactctgcatcctggt

SEQ ID NO: 13138 - DNA, 25 bp, Homo sapiens
tactctcttttttgggactactgtg

SEQ ID NO: 13139 - DNA, 25 bp, Homo sapiens
tattagatgggctgctctctcttac

SEQ ID NO: 13140 - DNA, 25 bp, Homo sapiens
tgtggacactttcaatggtgccttg

SEQ ID NO: 13141 - DNA, 25 bp, Homo sapiens
cacatgtgagggccggacagcgaac

SEQ ID NO: 13142 - DNA, 25 bp, Homo sapiens
ccagctcgcagacctacatgaacgg

SEQ ID NO: 13143 - DNA, 25 bp, Homo sapiens
cctgcagtacaactccatgaccagc

SEQ ID NO: 13144 - DNA, 25 bp, Homo sapiens
ctgcccctctcacacatgtgagggc

SEQ ID NO: 13145 - DNA, 25 bp, Homo sapiens
ctggagcaacggcagctacagcatg

SEQ ID NO: 13146 - DNA, 25 bp, Homo sapiens
gcacatgaacggctggagcaacggc

SEQ ID NO: 13147 - DNA, 25 bp, Homo sapiens
gcatggagaaaacccggtacgctca

SEQ ID NO: 13148 - DNA, 25 bp, Homo sapiens
gccggacagcgaactggagggggga

SEQ ID NO: 13149 - DNA, 25 bp, Homo sapiens
gctacagcatgatgcaggaccagct

SEQ ID NO: 13150 - DNA, 25 bp, Homo sapiens
gctccatgggttcggtggtcaagtc

SEQ ID NO: 13151 - DNA, 25 bp, Homo sapiens
ttcggtggtcaagtccgaggccagc

SEQ ID NO: 13152 - DNA, 25 bp, Homo sapiens
accggcacaacgacgtggtgcccac

SEQ ID NO: 13153 - DNA, 25 bp, Homo sapiens
agagctggtatgtccagagcctcct

SEQ ID NO: 13154 - DNA, 25 bp, Homo sapiens
caggcaggagctgcctgtgcgcctg

SEQ ID NO: 13155 - DNA, 25 bp, Homo sapiens
ctggtatgtccagagcctcctggac

SEQ ID NO: 13156 - DNA, 25 bp, Homo sapiens
ctggtgcagagctggtatgtccaga

SEQ ID NO: 13157 - DNA, 25 bp, Homo sapiens
ggatccagcaatgcctgtgagaaaa

SEQ ID NO: 13158 - DNA, 25 bp, Homo sapiens
gtacaaggacacctacggcgatgac

SEQ ID NO: 13159 - DNA, 25 bp, Homo sapiens
gtgcccaccatggcacaaggcgtgc

SEQ ID NO: 13160 - DNA, 25 bp, Homo sapiens
tcaccatccggaaccggcacaacga

SEQ ID NO: 13161 - DNA, 25 bp, Homo sapiens
tgaaagagatcaacctgcttcccga

SEQ ID NO: 13162 - DNA, 25 bp, Homo sapiens
tggtgcccaccatggcacaaggcgt

SEQ ID NO: 13163 - DNA, 25 bp, Homo sapiens
aagtcgacttttcatatctttctcc

SEQ ID NO: 13164 - DNA, 25 bp, Homo sapiens
agtggtggcagcagatcctgtggcc

SEQ ID NO: 13165 - DNA, 25 bp, Homo sapiens
ctgaggagcggctcagtgtcacctc

SEQ ID NO: 13166 - DNA, 25 bp, Homo sapiens
ctttctcctgaaatgaactctgttt

SEQ ID NO: 13167 - DNA, 25 bp, Homo sapiens
gaaatgcatgtgttgtgcgcgttgg

SEQ ID NO: 13168 - DNA, 25 bp, Homo sapiens
gacaatttcaaccttaatctattta

SEQ ID NO: 13169 - DNA, 25 bp, Homo sapiens
ggacgggacccagtgatacttgtat

SEQ ID NO: 13170 - DNA, 25 bp, Homo sapiens
tattacacagtcctgatttcagaca

SEQ ID NO: 13171 - DNA, 25 bp, Homo sapiens
tgacccttaatccagacaccgatgg

SEQ ID NO: 13172 - DNA, 25 bp, Homo sapiens
tgtgcgcgttggggatgggaggagg

SEQ ID NO: 13173 - DNA, 25 bp, Homo sapiens
ttaagccttttaccatttgaaatgc

SEQ ID NO: 13174 - DNA, 25 bp, Homo sapiens
agatatgggggcttcatgagaggct

SEQ ID NO: 13175 - DNA, 25 bp, Homo sapiens
atggaggtttcctgaagcgctttgc

SEQ ID NO: 13176 - DNA, 25 bp, Homo sapiens
ctattgcagctatctcgttttcatg

SEQ ID NO: 13177 - DNA, 25 bp, Homo sapiens
gcttgccttgtatagttgacttcat

SEQ ID NO: 13178 - DNA, 25 bp, Homo sapiens
ggtcgcccagagtggtggatggact

SEQ ID NO: 13179 - DNA, 25 bp, Homo sapiens
gtgctctttttggagtctttaagct

SEQ ID NO: 13180 - DNA, 25 bp, Homo sapiens
gtttttgttatcttgtctcttattt

SEQ ID NO: 13181 - DNA, 25 bp, Homo sapiens
tcatgagaagagtaggtcgcccaga

SEQ ID NO: 13182 - DNA, 25 bp, Homo sapiens
tctgccctccgacgaagaaggcgaa

SEQ ID NO: 13183 - DNA, 25 bp, Homo sapiens
ttattgtcatgtgttgcttgccttg

SEQ ID NO: 13184 - DNA, 25 bp, Homo sapiens
tttcaggttctgtgctctttttgga

SEQ ID NO: 13185 - DNA, 25 bp, Homo sapiens
acaagggccaatggaaccaagtttg

SEQ ID NO: 13186 - DNA, 25 bp, Homo sapiens
acttctgatcgaaggtcatccctct

SEQ ID NO: 13187 - DNA, 25 bp, Homo sapiens
acttgggtcctgagtatggtgacta

SEQ ID NO: 13188 - DNA, 25 bp, Homo sapiens
gagtcttgccaggtcaatacttggg

SEQ ID NO: 13189 - DNA, 25 bp, Homo sapiens
gccaggtcaatacttgggtcctgag

SEQ ID NO: 13190 - DNA, 25 bp, Homo sapiens
ggaaatgctaattcagctcctccag

SEQ ID NO: 13191 - DNA, 25 bp, Homo sapiens
ggaaccaagtttgagtcttgccagg

SEQ ID NO: 13192 - DNA, 25 bp, Homo sapiens
tatggtgactagtatctgttttgtt

SEQ ID NO: 13193 - DNA, 25 bp, Homo sapiens
tatgtgtgtattattccagccagaa

SEQ ID NO: 13194 - DNA, 25 bp, Homo sapiens
tcagctttaccctctgaacttctga

SEQ ID NO: 13195 - DNA, 25 bp, Homo sapiens
ttaccctctgaacttctgatcgaag

SEQ ID NO: 13196 - DNA, 25 bp, Homo sapiens
aaaattgcttcctggtccttagagg

SEQ ID NO: 13197 - DNA, 25 bp, Homo sapiens
agctttgatcctcttttggttttgc

SEQ ID NO: 13198 - DNA, 25 bp, Homo sapiens
ctttcatttccactctagcaaaaac

SEQ ID NO: 13199 - DNA, 25 bp, Homo sapiens
ctttgatcctcttttggttttgcag

SEQ ID NO: 13200 - DNA, 25 bp, Homo sapiens
gaggactaaaaacaagaccctcatt

SEQ ID NO: 13201 - DNA, 25 bp, Homo sapiens
gcaaaaactgggcttgcgtttttct

SEQ ID NO: 13202 - DNA, 25 bp, Homo sapiens
gcttcctggtccttagaggactaaa

SEQ ID NO: 13203 - DNA, 25 bp, Homo sapiens
ggcatcctgaattttagagcctttc

SEQ ID NO: 13204 - DNA, 25 bp, Homo sapiens
gttgttaggagtttttgctggcatt

SEQ ID NO: 13205 - DNA, 25 bp, Homo sapiens
gttttgcagttgttaggagtttttg

SEQ ID NO: 13206 - DNA, 25 bp, Homo sapiens
tttacaagggaacagggcatcctga

SEQ ID NO: 13207 - DNA, 25 bp, Homo sapiens
aaactgggctttgtagcgtctgccg

SEQ ID NO: 13208 - DNA, 25 bp, Homo sapiens
aaatggtaaactcctccacgtgctt

SEQ ID NO: 13209 - DNA, 25 bp, Homo sapiens
aactgccgatttcaggggcgggtgc

SEQ ID NO: 13210 - DNA, 25 bp, Homo sapiens
atgatgaggtaagtgcgcaatgcta

SEQ ID NO: 13211 - DNA, 25 bp, Homo sapiens
catctttccttctctaagcacaaag

SEQ ID NO: 13212 - DNA, 25 bp, Homo sapiens
ctgcctgcgttgcaaactgggcttt

SEQ ID NO: 13213 - DNA, 25 bp, Homo sapiens
gaataacccaaaactgccgatttca

SEQ ID NO: 13214 - DNA, 25 bp, Homo sapiens
gcagagagtgtatcatctgttttat

SEQ ID NO: 13215 - DNA, 25 bp, Homo sapiens
ggggcgggtgcattgtagttattat

SEQ ID NO: 13216 - DNA, 25 bp, Homo sapiens
gtgatttggttattttggtacctga

SEQ ID NO: 13217 - DNA, 25 bp, Homo sapiens
tttggtacctgagaacgtaacagaa

SEQ ID NO: 13218 - DNA, 25 bp, Homo sapiens
acacatctaatgattccaacctcga

SEQ ID NO: 13219 - DNA, 25 bp, Homo sapiens
atggggatgcccaagtaccctaagc

SEQ ID NO: 13220 - DNA, 25 bp, Homo sapiens
gaaacccaccctggtggtctctaga

SEQ ID NO: 13221 - DNA, 25 bp, Homo sapiens
gaaatcataaacaccaaatcctcca

SEQ ID NO: 13222 - DNA, 25 bp, Homo sapiens
gaatactccccaggcccatggggat

SEQ ID NO: 13223 - DNA, 25 bp, Homo sapiens
gaatctctgcttgttaaccattgtt

SEQ ID NO: 13224 - DNA, 25 bp, Homo sapiens
gatcctttcatggcactgtagctca

SEQ ID NO: 13225 - DNA, 25 bp, Homo sapiens
gtacatactcctcagacgatgcaca

SEQ ID NO: 13226 - DNA, 25 bp, Homo sapiens
gtcattaactggggctccgagcagc

SEQ ID NO: 13227 - DNA, 25 bp, Homo sapiens
ttagcctctgtatagttcctttttt

SEQ ID NO: 13228 - DNA, 25 bp, Homo sapiens
tttagtcctggttgcttttagcctc

SEQ ID NO: 13229 - DNA, 25 bp, Homo sapiens
attaaaaggagtccaacattcccag

SEQ ID NO: 13230 - DNA, 25 bp, Homo sapiens
attccaggacaaggttaactaggtg

SEQ ID NO: 13231 - DNA, 25 bp, Homo sapiens
caataggtttgggacacttctgttt

SEQ ID NO: 13232 - DNA, 25 bp, Homo sapiens
cctaggtgtctgctgcgataaaatg

SEQ ID NO: 13233 - DNA, 25 bp, Homo sapiens
ctaggtgtctgctgcgataaaatga

SEQ ID NO: 13234 - DNA, 25 bp, Homo sapiens
ctggtgggtccagtgttttgttcct

SEQ ID NO: 13235 - DNA, 25 bp, Homo sapiens
gtaattcttccatagttgacttgaa

SEQ ID NO: 13236 - DNA, 25 bp, Homo sapiens
gtggcggctacaaataacctatata

SEQ ID NO: 13237 - DNA, 25 bp, Homo sapiens
tgatgcttttattgcccagttttct

SEQ ID NO: 13238 - DNA, 25 bp, Homo sapiens
tgccagctaacagtaattcttccat

SEQ ID NO: 13239 - DNA, 25 bp, Homo sapiens
tgcccagttttctctggtgggtcca

SEQ ID NO: 13240 - DNA, 25 bp, Homo sapiens
actttccctgatcctgcaattaaag

SEQ ID NO: 13241 - DNA, 25 bp, Homo sapiens
cactgcctgctacttgagggccagg

SEQ ID NO: 13242 - DNA, 25 bp, Homo sapiens
cccagcttccatgctgactgatggt

SEQ ID NO: 13243 - DNA, 25 bp, Homo sapiens
ctgcatcccgcagatggctggaata

SEQ ID NO: 13244 - DNA, 25 bp, Homo sapiens
gccctgagccactgagtatgttcat

SEQ ID NO: 13245 - DNA, 25 bp, Homo sapiens
ggctggtaaattgccatggccctga

SEQ ID NO: 13246 - DNA, 25 bp, Homo sapiens
gtggcatatggaagggactcccagg

SEQ ID NO: 13247 - DNA, 25 bp, Homo sapiens
gtgtgtaggggggtttcagggctga

SEQ ID NO: 13248 - DNA, 25 bp, Homo sapiens
tcaggactttcctcagtgactgtgt

SEQ ID NO: 13249 - DNA, 25 bp, Homo sapiens
tcttccacttggtctgggtttggca

SEQ ID NO: 13250 - DNA, 25 bp, Homo sapiens
tggtctgggtttggcaggcactgcc

SEQ ID NO: 13251 - DNA, 25 bp, Homo sapiens
aaaccaaatggctgttaggtagatt

SEQ ID NO: 13252 - DNA, 25 bp, Homo sapiens
aattcttaccttctattatcctata

SEQ ID NO: 13253 - DNA, 25 bp, Homo sapiens
acaccactttggactcaagagactc

SEQ ID NO: 13254 - DNA, 25 bp, Homo sapiens
attagcttcaatacatccaaaccaa

SEQ ID NO: 13255 - DNA, 25 bp, Homo sapiens
caatatctgacaccactttggactc

SEQ ID NO: 13256 - DNA, 25 bp, Homo sapiens
gactcagtaacgtattatcctgttt

SEQ ID NO: 13257 - DNA, 25 bp, Homo sapiens
gatcagatgttttaacttggatttg

SEQ ID NO: 13258 - DNA, 25 bp, Homo sapiens
gcttggttttagctgtgttctctct

SEQ ID NO: 13259 - DNA, 25 bp, Homo sapiens
gttaggaacattacttctctgctta

SEQ ID NO: 13260 - DNA, 25 bp, Homo sapiens
tgttctctctggataacccacttga

SEQ ID NO: 13261 - DNA, 25 bp, Homo sapiens
tttatattgtgtttctctgcccatt

SEQ ID NO: 13262 - DNA, 25 bp, Homo sapiens
aggagagattgttctcaccaacccg

SEQ ID NO: 13263 - DNA, 25 bp, Homo sapiens
attactgcaaatcagccccagtgct

SEQ ID NO: 13264 - DNA, 25 bp, Homo sapiens
ccccagatcccacagtcagaactga

SEQ ID NO: 13265 - DNA, 25 bp, Homo sapiens
ccccagtgcttggcgatgcatttac

SEQ ID NO: 13266 - DNA, 25 bp, Homo sapiens
ccttcatgctgccttcaaagctaga

SEQ ID NO: 13267 - DNA, 25 bp, Homo sapiens
gaatctgcgttgttgggaagccagc

SEQ ID NO: 13268 - DNA, 25 bp, Homo sapiens
gcatttacagatttctaggccctca

SEQ ID NO: 13269 - DNA, 25 bp, Homo sapiens
gctagatcatgtttgccttgcttag

SEQ ID NO: 13270 - DNA, 25 bp, Homo sapiens
taaaccactcaaagattcagccccc

SEQ ID NO: 13271 - DNA, 25 bp, Homo sapiens
tcttctgctggatgctgcttgtaat

SEQ ID NO: 13272 - DNA, 25 bp, Homo sapiens
tttccacaacctttcagatgctgat

SEQ ID NO: 13273 - DNA, 25 bp, Homo sapiens
aggcttgagcctctcatcaaagtcc

SEQ ID NO: 13274 - DNA, 25 bp, Homo sapiens
aggcttttctcttaattatgaatca

SEQ ID NO: 13275 - DNA, 25 bp, Homo sapiens
ccttcctcttctggagcgtgaaatg

SEQ ID NO: 13276 - DNA, 25 bp, Homo sapiens
ctgcctggttaccgtggcgatgtgc

SEQ ID NO: 13277 - DNA, 25 bp, Homo sapiens
ggcccagagtctgacctgtgaggta

SEQ ID NO: 13278 - DNA, 25 bp, Homo sapiens
ggcgatgtgcttaatgcagcgttga

SEQ ID NO: 13279 - DNA, 25 bp, Homo sapiens
ggggcctctcaatcaaaatcccagt

SEQ ID NO: 13280 - DNA, 25 bp, Homo sapiens
gtgaggtagctagaaggcttgagcc

SEQ ID NO: 13281 - DNA, 25 bp, Homo sapiens
gtgtggataatggggcctctcaatc

SEQ ID NO: 13282 - DNA, 25 bp, Homo sapiens
tacagaatactgactcctctgtccc

SEQ ID NO: 13283 - DNA, 25 bp, Homo sapiens
tgaatcattccctgagggcaggccc

SEQ ID NO: 13284 - DNA, 25 bp, Homo sapiens
aaatccaggcttatacgcagactcc

SEQ ID NO: 13285 - DNA, 25 bp, Homo sapiens
acaactttgtcaggttcacgtccta

SEQ ID NO: 13286 - DNA, 25 bp, Homo sapiens
atacacccaggctatgcattgaaga

SEQ ID NO: 13287 - DNA, 25 bp, Homo sapiens
caccaccctgttgcaattaagacaa

SEQ ID NO: 13288 - DNA, 25 bp, Homo sapiens
cgcagactccgattcctagagaact

SEQ ID NO: 13289 - DNA, 25 bp, Homo sapiens
gaacacggaaatcctgttgtactta

SEQ ID NO: 13290 - DNA, 25 bp, Homo sapiens
gaacacgttctgtaaacgagtcgct

SEQ ID NO: 13291 - DNA, 25 bp, Homo sapiens
gacaaccgtgggggaacacaccact

SEQ ID NO: 13292 - DNA, 25 bp, Homo sapiens
ggaacacaccactttttactgttga

SEQ ID NO: 13293 - DNA, 25 bp, Homo sapiens
tgtacttaaagctagcggacccgtg

SEQ ID NO: 13294 - DNA, 25 bp, Homo sapiens
ttggctttagtgtgacgggatttga

SEQ ID NO: 13295 - DNA, 25 bp, Homo sapiens
agagaaagcgagacaggcccgtgga

SEQ ID NO: 13296 - DNA, 25 bp, Homo sapiens
ctcaagaggtcgtgccaatcagcca

SEQ ID NO: 13297 - DNA, 25 bp, Homo sapiens
ctggcctgcaaaaccatagtcagtt

SEQ ID NO: 13298 - DNA, 25 bp, Homo sapiens
ctgggatcaaactggcctgcaaaac

SEQ ID NO: 13299 - DNA, 25 bp, Homo sapiens
gacagtgattcccagacgggcagcg

SEQ ID NO: 13300 - DNA, 25 bp, Homo sapiens
gaggaactataagaacacctttaga

SEQ ID NO: 13301 - DNA, 25 bp, Homo sapiens
gatccggtgtctaaatgcattcata

SEQ ID NO: 13302 - DNA, 25 bp, Homo sapiens
ggcatcactatggactttctctatt

SEQ ID NO: 13303 - DNA, 25 bp, Homo sapiens
gtaaaatgcaaatagatccggtgtc

SEQ ID NO: 13304 - DNA, 25 bp, Homo sapiens
tttatttattgaggacccatggtaa

SEQ ID NO: 13305 - DNA, 25 bp, Homo sapiens
tttttttcatgcatgcattctcaag

SEQ ID NO: 13306 - DNA, 25 bp, Homo sapiens
acgtgggcatgtggggtgtgtgttt

SEQ ID NO: 13307 - DNA, 25 bp, Homo sapiens
aggagagtcccaggcagtggttctc

SEQ ID NO: 13308 - DNA, 25 bp, Homo sapiens
ctcacctgccaacgatttctcgtga

SEQ ID NO: 13309 - DNA, 25 bp, Homo sapiens
tgccagtggcacccagggcaaggac

SEQ ID NO: 13310 - DNA, 25 bp, Homo sapiens
ttaccttggtgaatctcacctgcca

SEQ ID NO: 13311 - DNA, 25 bp, Homo sapiens
ttgtgcgcgttggggatgggaggag

SEQ ID NO: 13312 - DNA, 25 bp, Homo sapiens
aacctcagcagatctgagccaccgc

SEQ ID NO: 13313 - DNA, 25 bp, Homo sapiens
aggatgacgggatcccgcacaagct

SEQ ID NO: 13314 - DNA, 25 bp, Homo sapiens
caaagacccagtgtcatttgctcct

SEQ ID NO: 13315 - DNA, 25 bp, Homo sapiens
ccaccgcctgccagtgtgagaggcg

SEQ ID NO: 13316 - DNA, 25 bp, Homo sapiens
ccttggaaaagtcctctcttcccag

SEQ ID NO: 13317 - DNA, 25 bp, Homo sapiens
ctgagattctcagatcacaggcccc

SEQ ID NO: 13318 - DNA, 25 bp, Homo sapiens
gccatccatgcgtggacgctgtgtg

SEQ ID NO: 13319 - DNA, 25 bp, Homo sapiens
gtgagaggcggccactttcatggca

SEQ ID NO: 13320 - DNA, 25 bp, Homo sapiens
taaataggagcctttctactggttt

SEQ ID NO: 13321 - DNA, 25 bp, Homo sapiens
tcccagctcctgattctggatctga

SEQ ID NO: 13322 - DNA, 25 bp, Homo sapiens
tgccttgcatattacttgagcttaa

SEQ ID NO: 13323 - DNA, 25 bp, Homo sapiens
acaagctgtagaccacctaatatca

SEQ ID NO: 13324 - DNA, 25 bp, Homo sapiens
acaggaaattgctacttaccgccgc

SEQ ID NO: 13325 - DNA, 25 bp, Homo sapiens
acatcattactgccatctttatcat

SEQ ID NO: 13326 - DNA, 25 bp, Homo sapiens
gaaagcactattaatactctgcagt

SEQ ID NO: 13327 - DNA, 25 bp, Homo sapiens
gaatatcagttaagcaccctggaag

SEQ ID NO: 13328 - DNA, 25 bp, Homo sapiens
gacagtcgtgcaagaagtagtggat

SEQ ID NO: 13329 - DNA, 25 bp, Homo sapiens
gaggagctgcaaattgcctgcaaaa

SEQ ID NO: 13330 - DNA, 25 bp, Homo sapiens
ggaatcctatttatcagactctgta

SEQ ID NO: 13331 - DNA, 25 bp, Homo sapiens
gtggggtggcgggaatcctatttat

SEQ ID NO: 13332 - DNA, 25 bp, Homo sapiens
tcttatctttgctccctgcaagaaa

SEQ ID NO: 13333 - DNA, 25 bp, Homo sapiens
tggcaaggtcgtgtcatctgaagtc

SEQ ID NO: 13334 - DNA, 25 bp, Homo sapiens
catcacgaagcagctccaaaaggaa

SEQ ID NO: 13335 - DNA, 25 bp, Homo sapiens
ccgtcctgctgatgtggtaggctag

SEQ ID NO: 13336 - DNA, 25 bp, Homo sapiens
gaatgaggcagttggcaaacttctc

SEQ ID NO: 13337 - DNA, 25 bp, Homo sapiens
ggaacgtgccccagaatgaggcagt

SEQ ID NO: 13338 - DNA, 25 bp, Homo sapiens
ggcaaacttctcaggacaatgaatc

SEQ ID NO: 13339 - DNA, 25 bp, Homo sapiens
ggcagttggcaaacttctcaggaca

SEQ ID NO: 13340 - DNA, 25 bp, Homo sapiens
ggtaggctagcaatattttggttaa

SEQ ID NO: 13341 - DNA, 25 bp, Homo sapiens
ttatgccacacagtgcattgttttt

SEQ ID NO: 13342 - DNA, 25 bp, Homo sapiens
ttctacctgcttgtcttatttttag

SEQ ID NO: 13343 - DNA, 25 bp, Homo sapiens
tttctttttatgccacacagtgcat

SEQ ID NO: 13344 - DNA, 25 bp, Homo sapiens
ttttttctacctgcttgtcttattt

SEQ ID NO: 13345 - DNA, 25 bp, Homo sapiens
accagttttccagaacactcttagc

SEQ ID NO: 13346 - DNA, 25 bp, Homo sapiens
agctgcacagtgttggtttccttgt

SEQ ID NO: 13347 - DNA, 25 bp, Homo sapiens
agttttgcttttgactccaggaaca

SEQ ID NO: 13348 - DNA, 25 bp, Homo sapiens
ataaaaatctagcacactcttctct

SEQ ID NO: 13349 - DNA, 25 bp, Homo sapiens
atggttatccaattgctctttcaca

SEQ ID NO: 13350 - DNA, 25 bp, Homo sapiens
attgctctttcacaggtagcctatt

SEQ ID NO: 13351 - DNA, 25 bp, Homo sapiens
ccttccaggtgattctgtttcctta

SEQ ID NO: 13352 - DNA, 25 bp, Homo sapiens
gcctgaattggctatgcagtacatt

SEQ ID NO: 13353 - DNA, 25 bp, Homo sapiens
tctcagaagtccctgtttattccaa

SEQ ID NO: 13354 - DNA, 25 bp, Homo sapiens
tgacatgaggcagttccttccaggt

SEQ ID NO: 13355 - DNA, 25 bp, Homo sapiens
ttattgttatctttacctcctgagt

SEQ ID NO: 13356 - DNA, 25 bp, Homo sapiens
acatccacattttaggtccaacagc

SEQ ID NO: 13357 - DNA, 25 bp, Homo sapiens
agaagggaatctgttgtagcaaatg

SEQ ID NO: 13358 - DNA, 25 bp, Homo sapiens
agacattgggtcactcactggtcac

SEQ ID NO: 13359 - DNA, 25 bp, Homo sapiens
caaccagacattgggtcactcactg

SEQ ID NO: 13360 - DNA, 25 bp, Homo sapiens
caccttgccagtgcattttattaga

SEQ ID NO: 13361 - DNA, 25 bp, Homo sapiens
ccaatttacatccacattttaggtc

SEQ ID NO: 13362 - DNA, 25 bp, Homo sapiens
gaaatttgtttggacttccacttga

SEQ ID NO: 13363 - DNA, 25 bp, Homo sapiens
gagagagatttcccaaccagacatt

SEQ ID NO: 13364 - DNA, 25 bp, Homo sapiens
ggtccaacagcaagaagttcagaga

SEQ ID NO: 13365 - DNA, 25 bp, Homo sapiens
gtagcaaatgggaataaacctgggt

SEQ ID NO: 13366 - DNA, 25 bp, Homo sapiens
taaacctgggtttctatagacccag

SEQ ID NO: 13367 - DNA, 25 bp, Homo sapiens
agagagtattagacacccagtaaaa

SEQ ID NO: 13368 - DNA, 25 bp, Homo sapiens
atgactcttgttggattgttatttt

SEQ ID NO: 13369 - DNA, 25 bp, Homo sapiens
atgggtaacatgactcttgttggat

SEQ ID NO: 13370 - DNA, 25 bp, Homo sapiens
gaagcatcaagtctctttcttacca

SEQ ID NO: 13371 - DNA, 25 bp, Homo sapiens
gacttccacttgagacagtaaagag

SEQ ID NO: 13372 - DNA, 25 bp, Homo sapiens
gtatttggtcccagttgggtacatt

SEQ ID NO: 13373 - DNA, 25 bp, Homo sapiens
taggtggtttatagttcttttggct

SEQ ID NO: 13374 - DNA, 25 bp, Homo sapiens
tattttttgtttgcaatggggaatt

SEQ ID NO: 13375 - DNA, 25 bp, Homo sapiens
tcctgattttggagacttaaaacca

SEQ ID NO: 13376 - DNA, 25 bp, Homo sapiens
ttagacacccagtaaaaactgccat

SEQ ID NO: 13377 - DNA, 25 bp, Homo sapiens
ttcttaccaaagtcttgttaggtgg

SEQ ID NO: 13378 - DNA, 25 bp, Homo sapiens
aagaacgtcgtacctgacgctgagc

SEQ ID NO: 13379 - DNA, 25 bp, Homo sapiens
caaaccaagtgttgctgtgacattg

SEQ ID NO: 13380 - DNA, 25 bp, Homo sapiens
cccagccccagagggctttgtggag

SEQ ID NO: 13381 - DNA, 25 bp, Homo sapiens
cgggtgggcttggcactgtgccaag

SEQ ID NO: 13382 - DNA, 25 bp, Homo sapiens
gacgctgagcctgtcatgagaatgc

SEQ ID NO: 13383 - DNA, 25 bp, Homo sapiens
gcaagaggtggctgagcactcgggt

SEQ ID NO: 13384 - DNA, 25 bp, Homo sapiens
ggtctggtgggggacacccaagaat

SEQ ID NO: 13385 - DNA, 25 bp, Homo sapiens
gttgctgtgacattgattcagatgt

SEQ ID NO: 13386 - DNA, 25 bp, Homo sapiens
ttgccctcaagaacgtcgtacctga

SEQ ID NO: 13387 - DNA, 25 bp, Homo sapiens
tttcctcccggaggcagacagtctc

SEQ ID NO: 13388 - DNA, 25 bp, Homo sapiens
tttgtggaggacaggccttgccctc

SEQ ID NO: 13389 - DNA, 25 bp, Homo sapiens
attggcctgtgattgtttctttttt

SEQ ID NO: 13390 - DNA, 25 bp, Homo sapiens
atttgaaaactgttctgcctttttg

SEQ ID NO: 13391 - DNA, 25 bp, Homo sapiens
gtgattctgtgttcagcactattgt

SEQ ID NO: 13392 - DNA, 25 bp, Homo sapiens
tactgatcatcccagctgaacaatt

SEQ ID NO: 13393 - DNA, 25 bp, Homo sapiens
tagaatgcgaactgctttgcctcat

SEQ ID NO: 13394 - DNA, 25 bp, Homo sapiens
taggcttttccgttagttctcaagg

SEQ ID NO: 13395 - DNA, 25 bp, Homo sapiens
tcaaggatcctcttttggctcttgg

SEQ ID NO: 13396 - DNA, 25 bp, Homo sapiens
tctgcctttttgttacatgaatctg

SEQ ID NO: 13397 - DNA, 25 bp, Homo sapiens
tgtgatgtgttcaacctctgcactc

SEQ ID NO: 13398 - DNA, 25 bp, Homo sapiens
ttgcctcattccatactgatcatcc

SEQ ID NO: 13399 - DNA, 25 bp, Homo sapiens
ttttagtatactttctcttattctt

SEQ ID NO: 13400 - DNA, 25 bp, Homo sapiens
aatctcagaggtagggctgccacca

SEQ ID NO: 13401 - DNA, 25 bp, Homo sapiens
actggcccaagtggtttgtgctaac

SEQ ID NO: 13402 - DNA, 25 bp, Homo sapiens
aggtgaagatgggaacgcagatgat

SEQ ID NO: 13403 - DNA, 25 bp, Homo sapiens
cagatgatccatgagtttgccctgg

SEQ ID NO: 13404 - DNA, 25 bp, Homo sapiens
ctgcactttccgtagaccttaaaat

SEQ ID NO: 13405 - DNA, 25 bp, Homo sapiens
ctggtttcactggcccaagtggttt

SEQ ID NO: 13406 - DNA, 25 bp, Homo sapiens
gaggtagggctgccaccaaggtgaa

SEQ ID NO: 13407 - DNA, 25 bp, Homo sapiens
gggaacgcagatgatccatgagttt

SEQ ID NO: 13408 - DNA, 25 bp, Homo sapiens
gtagggctgccaccaaggtgaagat

SEQ ID NO: 13409 - DNA, 25 bp, Homo sapiens
tggtttgtgctaaccacgtctgtct

SEQ ID NO: 13410 - DNA, 25 bp, Homo sapiens
ttccgtagaccttaaaatctcagag

SEQ ID NO: 13411 - DNA, 25 bp, Homo sapiens
aagatgtccggaaaagcccgtgcgc

SEQ ID NO: 13412 - DNA, 25 bp, Homo sapiens
acctgcccaagactgtcacagggaa

SEQ ID NO: 13413 - DNA, 25 bp, Homo sapiens
agacattcatttggattcccctctt

SEQ ID NO: 13414 - DNA, 25 bp, Homo sapiens
atagagtttgtcttgaacctgccca

SEQ ID NO: 13415 - DNA, 25 bp, Homo sapiens
gacaagacagcagccaacattcgag

SEQ ID NO: 13416 - DNA, 25 bp, Homo sapiens
gaccccgtccgaggagaggtggtga

SEQ ID NO: 13417 - DNA, 25 bp, Homo sapiens
gagacttttggctccttggagaccg

SEQ ID NO: 13418 - DNA, 25 bp, Homo sapiens
gtatttccagtttatgggacgggca

SEQ ID NO: 13419 - DNA, 25 bp, Homo sapiens
gtggttgagacggctgtgatcagca

SEQ ID NO: 13420 - DNA, 25 bp, Homo sapiens
taccggattggaccctcggaggtag

SEQ ID NO: 13421 - DNA, 25 bp, Homo sapiens
tatcattaactccagcgggtaccgg

SEQ ID NO: 13422 - DNA, 25 bp, Homo sapiens
aactgtgaccatccaatgtgccatc

SEQ ID NO: 13423 - DNA, 25 bp, Homo sapiens
actggtacaactggtcacctactct

SEQ ID NO: 13424 - DNA, 25 bp, Homo sapiens
atagccaacactctgatgctgctct

SEQ ID NO: 13425 - DNA, 25 bp, Homo sapiens
ctttcttcccaggcttgacataggt

SEQ ID NO: 13426 - DNA, 25 bp, Homo sapiens
gaaagctgtaacaccctcagtaata

SEQ ID NO: 13427 - DNA, 25 bp, Homo sapiens
gaatccttgctctctaggatgcagg

SEQ ID NO: 13428 - DNA, 25 bp, Homo sapiens
gaatgccacacctgcaagttgatta

SEQ ID NO: 13429 - DNA, 25 bp, Homo sapiens
taaccactattcccctataacataa

SEQ ID NO: 13430 - DNA, 25 bp, Homo sapiens
tctgatcctgttcctaagttccaaa

SEQ ID NO: 13431 - DNA, 25 bp, Homo sapiens
tgcccctctgtaaatcaagccaact

SEQ ID NO: 13432 - DNA, 25 bp, Homo sapiens
ttcttgtaggaccaaccgtcccagt

SEQ ID NO: 13433 - DNA, 25 bp, Homo sapiens
aatcagtccccaatgcctggaaatt

SEQ ID NO: 13434 - DNA, 25 bp, Homo sapiens
agatgtggaaagcttcagcaggcca

SEQ ID NO: 13435 - DNA, 25 bp, Homo sapiens
caaagatggggtgccaagacggtgc

SEQ ID NO: 13436 - DNA, 25 bp, Homo sapiens
cagccttttatctccaagcggaaag

SEQ ID NO: 13437 - DNA, 25 bp, Homo sapiens
cgtgaacagccttttatctccaagc

SEQ ID NO: 13438 - DNA, 25 bp, Homo sapiens
ctgggagaccgaccctgattttgtg

SEQ ID NO: 13439 - DNA, 25 bp, Homo sapiens
gaatttcgtgaacagccttttatct

SEQ ID NO: 13440 - DNA, 25 bp, Homo sapiens
gaccgaccctgattttgtgaatgat

SEQ ID NO: 13441 - DNA, 25 bp, Homo sapiens
gcctggaaattcctcattggattac

SEQ ID NO: 13442 - DNA, 25 bp, Homo sapiens
tcgcccaggatgacgcgggggccga

SEQ ID NO: 13443 - DNA, 25 bp, Homo sapiens
ttcctcattggattactgtgtttta

SEQ ID NO: 13444 - DNA, 25 bp, Homo sapiens
agatttggctgatccaattaacatg

SEQ ID NO: 13445 - DNA, 25 bp, Homo sapiens
agcagcagaatcagagtacgagatg

SEQ ID NO: 13446 - DNA, 25 bp, Homo sapiens
cttcggcattctccttaggacttat

SEQ ID NO: 13447 - DNA, 25 bp, Homo sapiens
ggacttatctgcttgtagatttggc

SEQ ID NO: 13448 - DNA, 25 bp, Homo sapiens
ggcattctccttaggacttatctgc

SEQ ID NO: 13449 - DNA, 25 bp, Homo sapiens
gtacgagatgcttgacactgtgtcc

SEQ ID NO: 13450 - DNA, 25 bp, Homo sapiens
tccttaggacttatctgcttgtaga

SEQ ID NO: 13451 - DNA, 25 bp, Homo sapiens
tcggcattctccttaggacttatct

SEQ ID NO: 13452 - DNA, 25 bp, Homo sapiens
tctctgtaatttgtgctttaagcat

SEQ ID NO: 13453 - DNA, 25 bp, Homo sapiens
tctgcttgtagatttggctgatcca

SEQ ID NO: 13454 - DNA, 25 bp, Homo sapiens
ttctccttaggacttatctgcttgt

SEQ ID NO: 13455 - DNA, 25 bp, Homo sapiens
agtcaatgaccttgggacagtggag

SEQ ID NO: 13456 - DNA, 25 bp, Homo sapiens
ctctgcactctgctgctttgaaatc

SEQ ID NO: 13457 - DNA, 25 bp, Homo sapiens
ctctgctgctttgaaatctggttga

SEQ ID NO: 13458 - DNA, 25 bp, Homo sapiens
gaaatcctaagcctaaaataacctg

SEQ ID NO: 13459 - DNA, 25 bp, Homo sapiens
gactttgatttctcagaggcaccca

SEQ ID NO: 13460 - DNA, 25 bp, Homo sapiens
gcgagacttacactcaagcaatcct

SEQ ID NO: 13461 - DNA, 25 bp, Homo sapiens
ggaatactgagggagggcctggcta

SEQ ID NO: 13462 - DNA, 25 bp, Homo sapiens
ggcacttactgctgcaaagcagtca

SEQ ID NO: 13463 - DNA, 25 bp, Homo sapiens
ggcgtacctccaaacataattgatt

SEQ ID NO: 13464 - DNA, 25 bp, Homo sapiens
gtttgcccagattgcttaattaaaa

SEQ ID NO: 13465 - DNA, 25 bp, Homo sapiens
tcttgcaaggcgtacctccaaacat

SEQ ID NO: 13466 - DNA, 25 bp, Homo sapiens
acaggtatgcgtgattgtgtgtgtg

SEQ ID NO: 13467 - DNA, 25 bp, Homo sapiens
acctccctgagatcaaccaaggcag

SEQ ID NO: 13468 - DNA, 25 bp, Homo sapiens
agttctccactccaatgataatagt

SEQ ID NO: 13469 - DNA, 25 bp, Homo sapiens
atgcctacaggtatgcgtgattgtg

SEQ ID NO: 13470 - DNA, 25 bp, Homo sapiens
ccacagttctccctgagagagatca

SEQ ID NO: 13471 - DNA, 25 bp, Homo sapiens
gagagagatcaacctccctgagatc

SEQ ID NO: 13472 - DNA, 25 bp, Homo sapiens
gatgtgacagcaagggccacggacc

SEQ ID NO: 13473 - DNA, 25 bp, Homo sapiens
tagtgctggacagtgacaacccttt

SEQ ID NO: 13474 - DNA, 25 bp, Homo sapiens
tgcctgcagctgtgtagtgctggac

SEQ ID NO: 13475 - DNA, 25 bp, Homo sapiens
tgggaatgtgtaccatctgtgtgcc

SEQ ID NO: 13476 - DNA, 25 bp, Homo sapiens
tgtctacctatgtgtctttctggga

SEQ ID NO: 13477 - DNA, 25 bp, Homo sapiens
acatctgccctgactgaatgtgttc

SEQ ID NO: 13478 - DNA, 25 bp, Homo sapiens
actatatgccataaacctcaagtta

SEQ ID NO: 13479 - DNA, 25 bp, Homo sapiens
atggagcttttcctgatgttccact

SEQ ID NO: 13480 - DNA, 25 bp, Homo sapiens
atgttccactccactttgtatagac

SEQ ID NO: 13481 - DNA, 25 bp, Homo sapiens
cagcaccatttatgagtctcaagtt

SEQ ID NO: 13482 - DNA, 25 bp, Homo sapiens
cctttctcctcgtatgtgtgtttac

SEQ ID NO: 13483 - DNA, 25 bp, Homo sapiens
gatataggtttccaattaagtacat

SEQ ID NO: 13484 - DNA, 25 bp, Homo sapiens
ggggtgaagattcagtttcagtctt

SEQ ID NO: 13485 - DNA, 25 bp, Homo sapiens
tggtgcctccagacatgtgcacatg

SEQ ID NO: 13486 - DNA, 25 bp, Homo sapiens
tgtatagacatctgccctgactgaa

SEQ ID NO: 13487 - DNA, 25 bp, Homo sapiens
tgtttacctaaactatatgccataa

SEQ ID NO: 13488 - DNA, 25 bp, Homo sapiens
ctccctggggcaccggttggagagg

SEQ ID NO: 13489 - DNA, 25 bp, Homo sapiens
gacagacaggaaaacacccaccagc

SEQ ID NO: 13490 - DNA, 25 bp, Homo sapiens
gacccatcaggggcgaggagggcac

SEQ ID NO: 13491 - DNA, 25 bp, Homo sapiens
gagactccaaataaaccggttcttg

SEQ ID NO: 13492 - DNA, 25 bp, Homo sapiens
gaggagatccccagagtcagggagg

SEQ ID NO: 13493 - DNA, 25 bp, Homo sapiens
gaggcggacagtggtcacggacctc

SEQ ID NO: 13494 - DNA, 25 bp, Homo sapiens
gcctgtccttgggagagggcgtcac

SEQ ID NO: 13495 - DNA, 25 bp, Homo sapiens
ggagggcacggaaacctgtgccgag

SEQ ID NO: 13496 - DNA, 25 bp, Homo sapiens
ggcccagaaccctgcagatgaagcc

SEQ ID NO: 13497 - DNA, 25 bp, Homo sapiens
gtgccgagatgggggcaagaggccc

SEQ ID NO: 13498 - DNA, 25 bp, Homo sapiens
tcacccggtcagagactccaaataa

SEQ ID NO: 13499 - DNA, 25 bp, Homo sapiens
aggccacagggcacaatgagctctc

SEQ ID NO: 13500 - DNA, 25 bp, Homo sapiens
aggcccttctcactgagacagcaac

SEQ ID NO: 13501 - DNA, 25 bp, Homo sapiens
attagcgcattctctatccaacatt

SEQ ID NO: 13502 - DNA, 25 bp, Homo sapiens
gaaagaacggattatgccccattaa

SEQ ID NO: 13503 - DNA, 25 bp, Homo sapiens
gaaagcctccatatagttagattgt

SEQ ID NO: 13504 - DNA, 25 bp, Homo sapiens
gaaagtccctggtcaggtctcaggt

SEQ ID NO: 13505 - DNA, 25 bp, Homo sapiens
gagcatccatttgagttgaaggcca

SEQ ID NO: 13506 - DNA, 25 bp, Homo sapiens
gttgttgttgctctatcttattgta

SEQ ID NO: 13507 - DNA, 25 bp, Homo sapiens
gtttgttaagtgctctctggatttg

SEQ ID NO: 13508 - DNA, 25 bp, Homo sapiens
tatttgtggaactcactgcctcagt

SEQ ID NO: 13509 - DNA, 25 bp, Homo sapiens
tctcaggtagtgcggtgtggctcag

SEQ ID NO: 13510 - DNA, 25 bp, Homo sapiens
actatgtgggtggtcgcaacggaga

SEQ ID NO: 13511 - DNA, 25 bp, Homo sapiens
agacaagggccgctatctgtctttt

SEQ ID NO: 13512 - DNA, 25 bp, Homo sapiens
gacctggaggagatctttctgcacc

SEQ ID NO: 13513 - DNA, 25 bp, Homo sapiens
gagtaagaactcccttatcactaac

SEQ ID NO: 13514 - DNA, 25 bp, Homo sapiens
gcctctggcaatgccattcaggcca

SEQ ID NO: 13515 - DNA, 25 bp, Homo sapiens
ggcaaggtgtggagcgactatgtgg

SEQ ID NO: 13516 - DNA, 25 bp, Homo sapiens
gggtccgagtcaacacatactacat

SEQ ID NO: 13517 - DNA, 25 bp, Homo sapiens
tacatcgtaggtcttcaggtgcgct

SEQ ID NO: 13518 - DNA, 25 bp, Homo sapiens
taccccactagctgcagcagatgct

SEQ ID NO: 13519 - DNA, 25 bp, Homo sapiens
tgcaccctggggaatcagtgatcca

SEQ ID NO: 13520 - DNA, 25 bp, Homo sapiens
tggcctgcactgggatgtttacccc

SEQ ID NO: 13521 - DNA, 25 bp, Homo sapiens
agagcttatagccggaagccctggg

SEQ ID NO: 13522 - DNA, 25 bp, Homo sapiens
agccctgggacaaccaacagcagac

SEQ ID NO: 13523 - DNA, 25 bp, Homo sapiens
agctgctctggataacttgagacat

SEQ ID NO: 13524 - DNA, 25 bp, Homo sapiens
agtatgccaagaactcacgggcctc

SEQ ID NO: 13525 - DNA, 25 bp, Homo sapiens
agtcatgttcatagggtccctggtc

SEQ ID NO: 13526 - DNA, 25 bp, Homo sapiens
atattcctcagccagagcctggagt

SEQ ID NO: 13527 - DNA, 25 bp, Homo sapiens
catgggtgtgttactcagccaccac

SEQ ID NO: 13528 - DNA, 25 bp, Homo sapiens
cttgaagaagtgacgtccctgagcc

SEQ ID NO: 13529 - DNA, 25 bp, Homo sapiens
ggtcccctgcatggagagcataatg

SEQ ID NO: 13530 - DNA, 25 bp, Homo sapiens
gttcttacttcatggcttgggagtt

SEQ ID NO: 13531 - DNA, 25 bp, Homo sapiens
ttgcaagtgccttgtgaacacccac

SEQ ID NO: 13532 - DNA, 25 bp, Homo sapiens
aattgctcggtcttaggaacttcta

SEQ ID NO: 13533 - DNA, 25 bp, Homo sapiens
atgacaagtccttagtgagcaacct

SEQ ID NO: 13534 - DNA, 25 bp, Homo sapiens
ctatgtcctatcacaatttgcatgc

SEQ ID NO: 13535 - DNA, 25 bp, Homo sapiens
ctctcactctgttctgcaagtcaat

SEQ ID NO: 13536 - DNA, 25 bp, Homo sapiens
ctgctacctgaccttaaacgatgat

SEQ ID NO: 13537 - DNA, 25 bp, Homo sapiens
gacaatctgctgtaccaaaagttgg

SEQ ID NO: 13538 - DNA, 25 bp, Homo sapiens
gtactagatgtcctgctaaaccctt

SEQ ID NO: 13539 - DNA, 25 bp, Homo sapiens
gtgagcaacctactgtgtactagat

SEQ ID NO: 13540 - DNA, 25 bp, Homo sapiens
tactattctgttatctgagggggga

SEQ ID NO: 13541 - DNA, 25 bp, Homo sapiens
tgatggctacagtttctcatcttcc

SEQ ID NO: 13542 - DNA, 25 bp, Homo sapiens
ttgaaccctactaataccttggcct

SEQ ID NO: 13543 - DNA, 25 bp, Homo sapiens
aatggtctgtttagcacttctgtat

SEQ ID NO: 13544 - DNA, 25 bp, Homo sapiens
acaaggcccaggctggggccagggc

SEQ ID NO: 13545 - DNA, 25 bp, Homo sapiens
acatttcaaattcaccctacattcc

SEQ ID NO: 13546 - DNA, 25 bp, Homo sapiens
actctgtatctgtttctagcatgtg

SEQ ID NO: 13547 - DNA, 25 bp, Homo sapiens
cactagcctctctgaaggtgtcctg

SEQ ID NO: 13548 - DNA, 25 bp, Homo sapiens
ctcagcccacaggccactgtgataa

SEQ ID NO: 13549 - DNA, 25 bp, Homo sapiens
gaggggaaggccctggattctcact

SEQ ID NO: 13550 - DNA, 25 bp, Homo sapiens
gcatgtgctgcattgactctattaa

SEQ ID NO: 13551 - DNA, 25 bp, Homo sapiens
ggagaagcactggtgtctgcagcac

SEQ ID NO: 13552 - DNA, 25 bp, Homo sapiens
tctctttctttgttctgtttgttta

SEQ ID NO: 13553 - DNA, 25 bp, Homo sapiens
tggccagccctggagaagcactggt

SEQ ID NO: 13554 - DNA, 25 bp, Homo sapiens
aaaccatttacggaggcacagctgc

SEQ ID NO: 13555 - DNA, 25 bp, Homo sapiens
aagtcaaggcttagaccctcatgct

SEQ ID NO: 13556 - DNA, 25 bp, Homo sapiens
acagggacaagtacagcacctccag

SEQ ID NO: 13557 - DNA, 25 bp, Homo sapiens
caggagagtccctggtctattccaa

SEQ ID NO: 13558 - DNA, 25 bp, Homo sapiens
gaaagttgagctcttcccaaatggc

SEQ ID NO: 13559 - DNA, 25 bp, Homo sapiens
gagaaaagcgtcttgtggtctgcga

SEQ ID NO: 13560 - DNA, 25 bp, Homo sapiens
gctgagaatgccgccttgcaacagc

SEQ ID NO: 13561 - DNA, 25 bp, Homo sapiens
gctttcctgagcatgactgattcca

SEQ ID NO: 13562 - DNA, 25 bp, Homo sapiens
ggactgtgtggagatcttcaccaat

SEQ ID NO: 13563 - DNA, 25 bp, Homo sapiens
gggagcccaacgatgatggcgggtc

SEQ ID NO: 13564 - DNA, 25 bp, Homo sapiens
tgtggtctgcgagttctgagccaac

SEQ ID NO: 13565 - DNA, 25 bp, Homo sapiens
tcccccaggcctgtagtggtggaga

SEQ ID NO: 13566 - DNA, 25 bp, Homo sapiens
actgattccttcactgacataatgt

SEQ ID NO: 13567 - DNA, 25 bp, Homo sapiens
atcactgattccttcactgacataa

SEQ ID NO: 13568 - DNA, 25 bp, Homo sapiens
catagagaacggttgctactggcag

SEQ ID NO: 13569 - DNA, 25 bp, Homo sapiens
ctggttcacctgtttactgttatca

SEQ ID NO: 13570 - DNA, 25 bp, Homo sapiens
cttagcaaaaatgcctcctcaccac

SEQ ID NO: 13571 - DNA, 25 bp, Homo sapiens
gaacggttgctactggcagaagcat

SEQ ID NO: 13572 - DNA, 25 bp, Homo sapiens
gaagccttagcaaaaatgcctcctc

SEQ ID NO: 13573 - DNA, 25 bp, Homo sapiens
gacataatgtaggaagcctctgagg

SEQ ID NO: 13574 - DNA, 25 bp, Homo sapiens
ggcagaagcataagatctttgtaca

SEQ ID NO: 13575 - DNA, 25 bp, Homo sapiens
ggtgaggggatgacccctggagatg

SEQ ID NO: 13576 - DNA, 25 bp, Homo sapiens
tcacctgtttactgttatcacaata

SEQ ID NO: 13577 - DNA, 25 bp, Homo sapiens
caacttcaacatctgtgacctcaag

SEQ ID NO: 13578 - DNA, 25 bp, Homo sapiens
cactagtcttgaggcccagcctagg

SEQ ID NO: 13579 - DNA, 25 bp, Homo sapiens
ccctgctgcccaactggatggaaaa

SEQ ID NO: 13580 - DNA, 25 bp, Homo sapiens
gactcaacactgggactctgagttc

SEQ ID NO: 13581 - DNA, 25 bp, Homo sapiens
gattccaacttcaacatctgtgacc

SEQ ID NO: 13582 - DNA, 25 bp, Homo sapiens
ggacaggcctcactagtcttgaggc

SEQ ID NO: 13583 - DNA, 25 bp, Homo sapiens
ggagcgagattccaacttcaacatc

SEQ ID NO: 13584 - DNA, 25 bp, Homo sapiens
ggcccagcctaggatggtagtcagg

SEQ ID NO: 13585 - DNA, 25 bp, Homo sapiens
ggtagtcaggggaaggagcgagatt

SEQ ID NO: 13586 - DNA, 25 bp, Homo sapiens
tagtgctcccagactcaacactggg

SEQ ID NO: 13587 - DNA, 25 bp, Homo sapiens
tgaggcccagcctaggatggtagtc

SEQ ID NO: 13588 - DNA, 25 bp, Homo sapiens
aaatcaaaccgagcagggctgtgtg

SEQ ID NO: 13589 - DNA, 25 bp, Homo sapiens
aaatcacttagcagcaactgaagac

SEQ ID NO: 13590 - DNA, 25 bp, Homo sapiens
acatggttgtaatatgcgactgcga

SEQ ID NO: 13591 - DNA, 25 bp, Homo sapiens
acttaggtaattgtagggcgaggat

SEQ ID NO: 13592 - DNA, 25 bp, Homo sapiens
agcatgctttctttgagttttaaat

SEQ ID NO: 13593 - DNA, 25 bp, Homo sapiens
aggtgtcatggactgttgccaccat

SEQ ID NO: 13594 - DNA, 25 bp, Homo sapiens
gaagacaattatcaaccacgtggag

SEQ ID NO: 13595 - DNA, 25 bp, Homo sapiens
gcagggctgtgtgaaacatggttgt

SEQ ID NO: 13596 - DNA, 25 bp, Homo sapiens
gccaccatgtattcatccagagttc

SEQ ID NO: 13597 - DNA, 25 bp, Homo sapiens
tatgcgactgcgaacactgaactct

SEQ ID NO: 13598 - DNA, 25 bp, Homo sapiens
tgcgaacactgaactctacgccact

SEQ ID NO: 13599 - DNA, 25 bp, Homo sapiens
aaagcaggcacttgacctggctgta

SEQ ID NO: 13600 - DNA, 25 bp, Homo sapiens
aggcacttgacctggctgtagccta

SEQ ID NO: 13601 - DNA, 25 bp, Homo sapiens
cacttgagcgcttcctgttgaataa

SEQ ID NO: 13602 - DNA, 25 bp, Homo sapiens
ctggctgtagcctaggtcttgagtg

SEQ ID NO: 13603 - DNA, 25 bp, Homo sapiens
gagcgcttcctgttgaataaagcag

SEQ ID NO: 13604 - DNA, 25 bp, Homo sapiens
gctccctattcactttacactgtga

SEQ ID NO: 13605 - DNA, 25 bp, Homo sapiens
gctgtagcctaggtcttgagtgaac

SEQ ID NO: 13606 - DNA, 25 bp, Homo sapiens
gggtttttctgaattgtctagatcc

SEQ ID NO: 13607 - DNA, 25 bp, Homo sapiens
gtggggggtgagtcccacttgagcg

SEQ ID NO: 13608 - DNA, 25 bp, Homo sapiens
tacactgtgaaaggtggggggtgag

SEQ ID NO: 13609 - DNA, 25 bp, Homo sapiens
tgtctagatccatgcattatttttc

SEQ ID NO: 13610 - DNA, 25 bp, Homo sapiens
agggtgtgggctatgggtcacctgc

SEQ ID NO: 13611 - DNA, 25 bp, Homo sapiens
caaggccagtggaacttgtgcccct

SEQ ID NO: 13612 - DNA, 25 bp, Homo sapiens
cacccagcactcggaggaggcggaa

SEQ ID NO: 13613 - DNA, 25 bp, Homo sapiens
cgcccgctttcttgtggagggtgtg

SEQ ID NO: 13614 - DNA, 25 bp, Homo sapiens
ctcagtacacggccaatctgttgca

SEQ ID NO: 13615 - DNA, 25 bp, Homo sapiens
ctgacctccaaggagaacctcccat

SEQ ID NO: 13616 - DNA, 25 bp, Homo sapiens
gacgtgagcatcacctgagggtctc

SEQ ID NO: 13617 - DNA, 25 bp, Homo sapiens
ggctgcagctttgaacacactgtcc

SEQ ID NO: 13618 - DNA, 25 bp, Homo sapiens
tcacctgctgcctggaggaggggcc

SEQ ID NO: 13619 - DNA, 25 bp, Homo sapiens
tgggagagaggcgtccagtgtcccc

SEQ ID NO: 13620 - DNA, 25 bp, Homo sapiens
ttggacatggtgatcagctgcctgg

SEQ ID NO: 13621 - DNA, 25 bp, Homo sapiens
aaagcaagcttgctaggtgccctct

SEQ ID NO: 13622 - DNA, 25 bp, Homo sapiens
aacttcagggaagcggtatcctgtc

SEQ ID NO: 13623 - DNA, 25 bp, Homo sapiens
aagcaacatagtggggtttctgtca

SEQ ID NO: 13624 - DNA, 25 bp, Homo sapiens
atgaattgaagaaactgacccttgt

SEQ ID NO: 13625 - DNA, 25 bp, Homo sapiens
cagggaagcggtatcctgtcactgg

SEQ ID NO: 13626 - DNA, 25 bp, Homo sapiens
ctcctgttctgactgctcatgaatt

SEQ ID NO: 13627 - DNA, 25 bp, Homo sapiens
gcctttaccggaagtgtggtgcatg

SEQ ID NO: 13628 - DNA, 25 bp, Homo sapiens
gctccagcctttaccggaagtgtgg

SEQ ID NO: 13629 - DNA, 25 bp, Homo sapiens
gtcactggggtatgggatgagcatg

SEQ ID NO: 13630 - DNA, 25 bp, Homo sapiens
gtggtgcatgtttttaacttcaggg

SEQ ID NO: 13631 - DNA, 25 bp, Homo sapiens
tgttctgactgctcatgaattgaag

SEQ ID NO: 13632 - DNA, 25 bp, Homo sapiens
agatccccatgaccgaagcggtgga

SEQ ID NO: 13633 - DNA, 25 bp, Homo sapiens
atggttggaggtcagcttcaggcct

SEQ ID NO: 13634 - DNA, 25 bp, Homo sapiens
cactagtggtcatggcatgtcctca

SEQ ID NO: 13635 - DNA, 25 bp, Homo sapiens
gtcctcatctcccaataaacatgac

SEQ ID NO: 13636 - DNA, 25 bp, Homo sapiens
tgaagctggtgaccccggaggggtc

SEQ ID NO: 13637 - DNA, 25 bp, Homo sapiens
tgagtccctaggggggtgtcaggaa

SEQ ID NO: 13638 - DNA, 25 bp, Homo sapiens
catgcagactgttagcttttacctt

SEQ ID NO: 13639 - DNA, 25 bp, Homo sapiens
ctcctttccactgctattagtcatg

SEQ ID NO: 13640 - DNA, 25 bp, Homo sapiens
ctgctattagtcatggtcactctcc

SEQ ID NO: 13641 - DNA, 25 bp, Homo sapiens
gaagcttttgaatcatccctattct

SEQ ID NO: 13642 - DNA, 25 bp, Homo sapiens
gagaccttctaattggtttttactg

SEQ ID NO: 13643 - DNA, 25 bp, Homo sapiens
gattcttctaggcatcatgtcctat

SEQ ID NO: 13644 - DNA, 25 bp, Homo sapiens
gccagtattcccagagttttggttt

SEQ ID NO: 13645 - DNA, 25 bp, Homo sapiens
ggtgcatgcagttgattacttctta

SEQ ID NO: 13646 - DNA, 25 bp, Homo sapiens
gtcttggggtttttggtgcatgcag

SEQ ID NO: 13647 - DNA, 25 bp, Homo sapiens
tcatccctattctgtgttttatcta

SEQ ID NO: 13648 - DNA, 25 bp, Homo sapiens
tttatgggcttcctgatgatgattc

SEQ ID NO: 13649 - DNA, 25 bp, Homo sapiens
actcctggaagttaactgcaccatc

SEQ ID NO: 13650 - DNA, 25 bp, Homo sapiens
ctctttgaaccagacgtctgcaccc

SEQ ID NO: 13651 - DNA, 25 bp, Homo sapiens
gacgtcgatgatagagttcaaggct

SEQ ID NO: 13652 - DNA, 25 bp, Homo sapiens
gggagtacttgtggtagacgtcgat

SEQ ID NO: 13653 - DNA, 25 bp, Homo sapiens
ggtattgatgactttattattctgc

SEQ ID NO: 13654 - DNA, 25 bp, Homo sapiens
gtcatccctgtagacggcatggaaa

SEQ ID NO: 13655 - DNA, 25 bp, Homo sapiens
gtgttgatatccaactctttgaacc

SEQ ID NO: 13656 - DNA, 25 bp, Homo sapiens
tggctttttttgtgggctgccacgc

SEQ ID NO: 13657 - DNA, 25 bp, Homo sapiens
ttattattctgcaggtacatgtcca

SEQ ID NO: 13658 - DNA, 25 bp, Homo sapiens
ttctccagctcggtcaacatgatgc

SEQ ID NO: 13659 - DNA, 25 bp, Homo sapiens
tttatcaccagaatgaggaactcct

SEQ ID NO: 13660 - DNA, 25 bp, Homo sapiens
cgtgagcatcacctgagggtctcag

SEQ ID NO: 13661 - DNA, 25 bp, Homo sapiens
ctgttctggggacgtgagcatcacc

SEQ ID NO: 13662 - DNA, 25 bp, Homo sapiens
cttcagctacaccgaggtggaagag

SEQ ID NO: 13663 - DNA, 25 bp, Homo sapiens
cttggacatggtgatcagctgcctg

SEQ ID NO: 13664 - DNA, 25 bp, Homo sapiens
ggaagagtgcggctgcatgggccgg

SEQ ID NO: 13665 - DNA, 25 bp, Homo sapiens
gggtctcaggaatgacgcttggaca

SEQ ID NO: 13666 - DNA, 25 bp, Homo sapiens
gttgcataaatacacttgagcattt

SEQ ID NO: 13667 - DNA, 25 bp, Homo sapiens
ccacaccgcagggacaagccctgga

SEQ ID NO: 13668 - DNA, 25 bp, Homo sapiens
cccagtcttgaggctctcactagaa

SEQ ID NO: 13669 - DNA, 25 bp, Homo sapiens
gagcaccctgtgtggcgaggtgccg

SEQ ID NO: 13670 - DNA, 25 bp, Homo sapiens
ggatgggagtgggcagaggtggcgc

SEQ ID NO: 13671 - DNA, 25 bp, Homo sapiens
tagaaaagtccacaacttccaggcc

SEQ ID NO: 13672 - DNA, 25 bp, Homo sapiens
aggtcctgaagatcgccaagttttt

SEQ ID NO: 13673 - DNA, 25 bp, Homo sapiens
ccagaaggacggagcctggaccctg

SEQ ID NO: 13674 - DNA, 25 bp, Homo sapiens
ccccctggtctgccagaaggacgga

SEQ ID NO: 13675 - DNA, 25 bp, Homo sapiens
ccctgggtgcagaagatcctggccg

SEQ ID NO: 13676 - DNA, 25 bp, Homo sapiens
cctgccttaagatttcccattaaat

SEQ ID NO: 13677 - DNA, 25 bp, Homo sapiens
gaaccccaagttcagcattctgacc

SEQ ID NO: 13678 - DNA, 25 bp, Homo sapiens
ggggcaagaccaagtacaacgggtg

SEQ ID NO: 13679 - DNA, 25 bp, Homo sapiens
tcaccaagctcataccctgggtgca

SEQ ID NO: 13680 - DNA, 25 bp, Homo sapiens
tcagcattctgaccgtgaacaatga

SEQ ID NO: 13681 - DNA, 25 bp, Homo sapiens
tgaacaatgacatcaccctgctgaa

SEQ ID NO: 13682 - DNA, 25 bp, Homo sapiens
tggaccctggtgggcattgtgtcct

SEQ ID NO: 13683 - DNA, 25 bp, Homo sapiens
aaactatctcattcccaagggcaca

SEQ ID NO: 13684 - DNA, 25 bp, Homo sapiens
agatgtttgaccctcatcactttct

SEQ ID NO: 13685 - DNA, 25 bp, Homo sapiens
cactatctgtaatgccttttctcac

SEQ ID NO: 13686 - DNA, 25 bp, Homo sapiens
cagggacctccattttacagaactt

SEQ ID NO: 13687 - DNA, 25 bp, Homo sapiens
ccctgacttctgtgctacatgacaa

SEQ ID NO: 13688 - DNA, 25 bp, Homo sapiens
gagtttcctatgtttcactgtgcaa

SEQ ID NO: 13689 - DNA, 25 bp, Homo sapiens
gctgtgcttcattcctgtctgaaga

SEQ ID NO: 13690 - DNA, 25 bp, Homo sapiens
ggcacaaccatattaatttccctga

SEQ ID NO: 13691 - DNA, 25 bp, Homo sapiens
gtaaatacttcatgcctttctcagc

SEQ ID NO: 13692 - DNA, 25 bp, Homo sapiens
tcctctggggcattatccatctttc

SEQ ID NO: 13693 - DNA, 25 bp, Homo sapiens
ttgtcaatggatttgcctctgtgcc

SEQ ID NO: 13694 - DNA, 25 bp, Homo sapiens
aaagatgtggagatggtccggctgc

SEQ ID NO: 13695 - DNA, 25 bp, Homo sapiens
agctgaccttgacaaaccggagccc

SEQ ID NO: 13696 - DNA, 25 bp, Homo sapiens
cagcccagctggggggtcaggatag

SEQ ID NO: 13697 - DNA, 25 bp, Homo sapiens
gatagacgacattgtgggtcacagg

SEQ ID NO: 13698 - DNA, 25 bp, Homo sapiens
gcccccttcatttggcagtggaggc

SEQ ID NO: 13699 - DNA, 25 bp, Homo sapiens
gccccgtgtgatttgtttcattgtt

SEQ ID NO: 13700 - DNA, 25 bp, Homo sapiens
gcccctgcagcagcagtagcgacag

SEQ ID NO: 13701 - DNA, 25 bp, Homo sapiens
ggaggagagacagggcagcccagct

SEQ ID NO: 13702 - DNA, 25 bp, Homo sapiens
ggcagccgatgtgctggagcttctc

SEQ ID NO: 13703 - DNA, 25 bp, Homo sapiens
tccacgtggccgttatccacaaaga

SEQ ID NO: 13704 - DNA, 25 bp, Homo sapiens
tccggctgctccgagatgctggagc

SEQ ID NO: 13705 - DNA, 25 bp, Homo sapiens
aactgaggcgtataacggagcaaca

SEQ ID NO: 13706 - DNA, 25 bp, Homo sapiens
caccactaacaggcacacgtctggg

SEQ ID NO: 13707 - DNA, 25 bp, Homo sapiens
cggagcaacaatatcggttctcagt

SEQ ID NO: 13708 - DNA, 25 bp, Homo sapiens
ctcaccgaggcgctcaaaggcatgg

SEQ ID NO: 13709 - DNA, 25 bp, Homo sapiens
gaggcgctcaaaggcatggacaaga

SEQ ID NO: 13710 - DNA, 25 bp, Homo sapiens
gatgttcttgaacaacaccaccact

SEQ ID NO: 13711 - DNA, 25 bp, Homo sapiens
ggcacacgtctggggaaggcccagg

SEQ ID NO: 13712 - DNA, 25 bp, Homo sapiens
ggcccaggtagtaaaactggcgaca

SEQ ID NO: 13713 - DNA, 25 bp, Homo sapiens
tatcggttctcagtgtctatttcaa

SEQ ID NO: 13714 - DNA, 25 bp, Homo sapiens
tccacttcggttctttcgagtttag

SEQ ID NO: 13715 - DNA, 25 bp, Homo sapiens
tggagacaaccgtccggattttcca

SEQ ID NO: 13716 - DNA, 25 bp, Homo sapiens
acagtgtttcacttctagtaccaat

SEQ ID NO: 13717 - DNA, 25 bp, Homo sapiens
gaaccagtgcttctataactccagt

SEQ ID NO: 13718 - DNA, 25 bp, Homo sapiens
gaggccgagaacatgttgctcacct

SEQ ID NO: 13719 - DNA, 25 bp, Homo sapiens
gctgttccttagggacaccaagacc

SEQ ID NO: 13720 - DNA, 25 bp, Homo sapiens
gggaccgtctccagatacgagggag

SEQ ID NO: 13721 - DNA, 25 bp, Homo sapiens
gtcagatgtcatgtacaccgactgg

SEQ ID NO: 13722 - DNA, 25 bp, Homo sapiens
gtccgctcttgtgtctatactgaca

SEQ ID NO: 13723 - DNA, 25 bp, Homo sapiens
taactccagttacctgaatgtccag

SEQ ID NO: 13724 - DNA, 25 bp, Homo sapiens
tagggtcgctttcttttgtaacacg

SEQ ID NO: 13725 - DNA, 25 bp, Homo sapiens
tgatgtttggttcctacctggacga

SEQ ID NO: 13726 - DNA, 25 bp, Homo sapiens
ttgtgcattcccaggtcagatgtca

SEQ ID NO: 13727 - DNA, 25 bp, Homo sapiens
aaagccatgcaggatcactcaggat

SEQ ID NO: 13728 - DNA, 25 bp, Homo sapiens
aaagctcaacctgcaggagttccac

SEQ ID NO: 13729 - DNA, 25 bp, Homo sapiens
acctcaacaaccagctctatgacat

SEQ ID NO: 13730 - DNA, 25 bp, Homo sapiens
gaacatcgactttgacagtttcatc

SEQ ID NO: 13731 - DNA, 25 bp, Homo sapiens
ggagggcatgttcagagcttttcat

SEQ ID NO: 13732 - DNA, 25 bp, Homo sapiens
tgcagtcaacgacgcaggattccac

SEQ ID NO: 13733 - DNA, 25 bp, Homo sapiens
acatgggacggcgagacgcccagct

SEQ ID NO: 13734 - DNA, 25 bp, Homo sapiens
agaagaaacttcgccttatcagctt

SEQ ID NO: 13735 - DNA, 25 bp, Homo sapiens
agagtcggatcagtgcgtcatggag

SEQ ID NO: 13736 - DNA, 25 bp, Homo sapiens
atggatgctgtttcgactccagtgt

SEQ ID NO: 13737 - DNA, 25 bp, Homo sapiens
ccagaggatgcatctggctcaccgg

SEQ ID NO: 13738 - DNA, 25 bp, Homo sapiens
ccccctcccaaagcaagagtcggat

SEQ ID NO: 13739 - DNA, 25 bp, Homo sapiens
ccccgaggaatgcgcctctcggaag

SEQ ID NO: 13740 - DNA, 25 bp, Homo sapiens
ctatgtgccctggcggggagtgaga

SEQ ID NO: 13741 - DNA, 25 bp, Homo sapiens
gcagctgagctagacatgggacggc

SEQ ID NO: 13742 - DNA, 25 bp, Homo sapiens
gtgcgtcatggaggtctcagaccga

SEQ ID NO: 13743 - DNA, 25 bp, Homo sapiens
tgagcccccataacaggacgaactg

SEQ ID NO: 13744 - DNA, 25 bp, Homo sapiens
acatcaagaacggccagggcttcat

SEQ ID NO: 13745 - DNA, 25 bp, Homo sapiens
acatcaagcccatgcgggaccagat

SEQ ID NO: 13746 - DNA, 25 bp, Homo sapiens
caagcccatgcgggaccagatcatc

SEQ ID NO: 13747 - DNA, 25 bp, Homo sapiens
catgcgggaccagatcatccgcgtg

SEQ ID NO: 13748 - DNA, 25 bp, Homo sapiens
cgtccatgcgggacctgtacatcaa

SEQ ID NO: 13749 - DNA, 25 bp, Homo sapiens
gcccatgcgggaccagatcatccgc

SEQ ID NO: 13750 - DNA, 25 bp, Homo sapiens
gcgggaccagatcatccgcgtgaag

SEQ ID NO: 13751 - DNA, 25 bp, Homo sapiens
gcgggacctgtacatcaagaacggc

SEQ ID NO: 13752 - DNA, 25 bp, Homo sapiens
gggacctgtacatcaagaacggcca

SEQ ID NO: 13753 - DNA, 25 bp, Homo sapiens
gtacatcaagaacggccagggcttc

SEQ ID NO: 13754 - DNA, 25 bp, Homo sapiens
tccaggacatcaagcccatgcggga

SEQ ID NO: 13755 - DNA, 25 bp, Homo sapiens
acacccaccatgccaggggtggcaa

SEQ ID NO: 13756 - DNA, 25 bp, Homo sapiens
aggcttagtcagcagggctctgcca

SEQ ID NO: 13757 - DNA, 25 bp, Homo sapiens
cattgagcgtctaaggccactgtgc

SEQ ID NO: 13758 - DNA, 25 bp, Homo sapiens
cccagcagcggtgacgtggtcagca

SEQ ID NO: 13759 - DNA, 25 bp, Homo sapiens
gaaggtcaggactcatctgggcatg

SEQ ID NO: 13760 - DNA, 25 bp, Homo sapiens
gattggtgatggctacccagagcac

SEQ ID NO: 13761 - DNA, 25 bp, Homo sapiens
gccactggctccgatgggatgtggt

SEQ ID NO: 13762 - DNA, 25 bp, Homo sapiens
gtggtcagcatgcacaggagctcca

SEQ ID NO: 13763 - DNA, 25 bp, Homo sapiens
tacccagagcaccgcattgagcgtc

SEQ ID NO: 13764 - DNA, 25 bp, Homo sapiens
tcctggggtatagcacgtccactga

SEQ ID NO: 13765 - DNA, 25 bp, Homo sapiens
tgaatgccggtgatttgctgttcct

SEQ ID NO: 13766 - DNA, 25 bp, Homo sapiens
agccgctcgagtgcccatttgagcg

SEQ ID NO: 13767 - DNA, 25 bp, Homo sapiens
agctgccgactaagcattgactcac

SEQ ID NO: 13768 - DNA, 25 bp, Homo sapiens
gacagtgatcaggatagctgccgac

SEQ ID NO: 13769 - DNA, 25 bp, Homo sapiens
gatcaggatagctgccgactaagca

SEQ ID NO: 13770 - DNA, 25 bp, Homo sapiens
gcattgactcacagagcagcagcag

SEQ ID NO: 13771 - DNA, 25 bp, Homo sapiens
gccgactaagcattgactcacagag

SEQ ID NO: 13772 - DNA, 25 bp, Homo sapiens
gttccccatattattacagttccac

SEQ ID NO: 13773 - DNA, 25 bp, Homo sapiens
tgcccatttgagcggcagcactacc

SEQ ID NO: 13774 - DNA, 25 bp, Homo sapiens
tgctgagttccccatattattacag

SEQ ID NO: 13775 - DNA, 25 bp, Homo sapiens
ttacagttccacatcaaggccgagt

SEQ ID NO: 13776 - DNA, 25 bp, Homo sapiens
accatgcatccccaaaaccaaggag

SEQ ID NO: 13777 - DNA, 25 bp, Homo sapiens
agccatgcccttgaggagctggcca

SEQ ID NO: 13778 - DNA, 25 bp, Homo sapiens
agtaatgtggtccacagccatgccc

SEQ ID NO: 13779 - DNA, 25 bp, Homo sapiens
caagcagaagtaatgtggtccacag

SEQ ID NO: 13780 - DNA, 25 bp, Homo sapiens
caggtgaaacaaccttgccagcctc

SEQ ID NO: 13781 - DNA, 25 bp, Homo sapiens
catgcatccccaaaaccaaggagcc

SEQ ID NO: 13782 - DNA, 25 bp, Homo sapiens
ccacagccatgcccttgaggagctg

SEQ ID NO: 13783 - DNA, 25 bp, Homo sapiens
ccagcccagcagaagaccaagcaga

SEQ ID NO: 13784 - DNA, 25 bp, Homo sapiens
ccttgaggagctggccactggatac

SEQ ID NO: 13785 - DNA, 25 bp, Homo sapiens
gcagcaggtgaaacaaccttgccag

SEQ ID NO: 13786 - DNA, 25 bp, Homo sapiens
tgaggagctggccactggatactga

SEQ ID NO: 13787 - DNA, 25 bp, Homo sapiens
aacagtatttccacaatagggttca

SEQ ID NO: 13788 - DNA, 25 bp, Homo sapiens
aagctccttaagtttgaaggctgca

SEQ ID NO: 13789 - DNA, 25 bp, Homo sapiens
acaacacttgttatgaggggcctgt

SEQ ID NO: 13790 - DNA, 25 bp, Homo sapiens
attcctgcaaaattacctaccccag

SEQ ID NO: 13791 - DNA, 25 bp, Homo sapiens
ccaacccaactgacttctgctaggt

SEQ ID NO: 13792 - DNA, 25 bp, Homo sapiens
ccccagttcatctctgctgaacatt

SEQ ID NO: 13793 - DNA, 25 bp, Homo sapiens
gagagcgcgggagagagtgagagag

SEQ ID NO: 13794 - DNA, 25 bp, Homo sapiens
gctaggtagaggcatttgtcttaga

SEQ ID NO: 13795 - DNA, 25 bp, Homo sapiens
ttcacatcttagttaagctccttaa

SEQ ID NO: 13796 - DNA, 25 bp, Homo sapiens
ttctcagtttttgctgattgctaag

SEQ ID NO: 13797 - DNA, 25 bp, Homo sapiens
ttggaaaccatgcactagccaaccc

SEQ ID NO: 13798 - DNA, 25 bp, Homo sapiens
agcattataagaaaatgacctctgc

SEQ ID NO: 13799 - DNA, 25 bp, Homo sapiens
attgccaggggcttatttcagaaca

SEQ ID NO: 13800 - DNA, 25 bp, Homo sapiens
cgccatcagatcaacccctgatttt

SEQ ID NO: 13801 - DNA, 25 bp, Homo sapiens
ctctcctcatgttgcctttcggaga

SEQ ID NO: 13802 - DNA, 25 bp, Homo sapiens
gatcaacccctgattttacatcatg

SEQ ID NO: 13803 - DNA, 25 bp, Homo sapiens
gccaggggcttatttcagaacaact

SEQ ID NO: 13804 - DNA, 25 bp, Homo sapiens
gggcttatttcagaacaacttccac

SEQ ID NO: 13805 - DNA, 25 bp, Homo sapiens
tataccatctgagcacccattgctc

SEQ ID NO: 13806 - DNA, 25 bp, Homo sapiens
tcagaacaacttccacttactttcc

SEQ ID NO: 13807 - DNA, 25 bp, Homo sapiens
tcatgttgcctttcggagaagaggg

SEQ ID NO: 13808 - DNA, 25 bp, Homo sapiens
tctatctctgaggctgagcattata

SEQ ID NO: 13809 - DNA, 25 bp, Homo sapiens
aatatattctatttacatgtatgtc

SEQ ID NO: 13810 - DNA, 25 bp, Homo sapiens
aatgtgtttctgaagcaagacaaaa

SEQ ID NO: 13811 - DNA, 25 bp, Homo sapiens
atctgcatcttcagcttacaagatc

SEQ ID NO: 13812 - DNA, 25 bp, Homo sapiens
gaatggactcagaaatatgcaatgt

SEQ ID NO: 13813 - DNA, 25 bp, Homo sapiens
gtgttgtctaagatgtcagttttat

SEQ ID NO: 13814 - DNA, 25 bp, Homo sapiens
tacccttaagactgtgatgagagca

SEQ ID NO: 13815 - DNA, 25 bp, Homo sapiens
tattttttgctgaaactagatgttt

SEQ ID NO: 13816 - DNA, 25 bp, Homo sapiens
tcagcttacaagatctacaatgcag

SEQ ID NO: 13817 - DNA, 25 bp, Homo sapiens
tgaaaccatttgatttttacccatt

SEQ ID NO: 13818 - DNA, 25 bp, Homo sapiens
ttccaaaaatacccttaagactgtg

SEQ ID NO: 13819 - DNA, 25 bp, Homo sapiens
ttttcatatataccagagtactgta

SEQ ID NO: 13820 - DNA, 25 bp, Homo sapiens
aaatttccttcttgtaccatttctg

SEQ ID NO: 13821 - DNA, 25 bp, Homo sapiens
ctgctcctatgtgggtacctgagtc

SEQ ID NO: 13822 - DNA, 25 bp, Homo sapiens
cttcttgtaccatttctgtttagtt

SEQ ID NO: 13823 - DNA, 25 bp, Homo sapiens
cttttccagggctatactcagaaga

SEQ ID NO: 13824 - DNA, 25 bp, Homo sapiens
gacgtctgtctagcttaaatgaatg

SEQ ID NO: 13825 - DNA, 25 bp, Homo sapiens
gagtacagactttgaggtttcatca

SEQ ID NO: 13826 - DNA, 25 bp, Homo sapiens
gatgaaactgacaatccaatttgaa

SEQ ID NO: 13827 - DNA, 25 bp, Homo sapiens
gcattcaaactgcttttccagggct

SEQ ID NO: 13828 - DNA, 25 bp, Homo sapiens
gggtacctgagtcaaaattgtcatt

SEQ ID NO: 13829 - DNA, 25 bp, Homo sapiens
ttgtcaaggggctttgcattcaaac

SEQ ID NO: 13830 - DNA, 25 bp, Homo sapiens
ttgtgtcgacgtctgtctagcttaa

SEQ ID NO: 13831 - DNA, 25 bp, Homo sapiens
aacctcaggtgagcagagcctctac

SEQ ID NO: 13832 - DNA, 25 bp, Homo sapiens
attttcttctatcacaccacataaa

SEQ ID NO: 13833 - DNA, 25 bp, Homo sapiens
cataaataaccacccgcagtgtcca

SEQ ID NO: 13834 - DNA, 25 bp, Homo sapiens
cctgtgtatgggtcaatggctgcaa

SEQ ID NO: 13835 - DNA, 25 bp, Homo sapiens
gcagagcctctacttgagggactat

SEQ ID NO: 13836 - DNA, 25 bp, Homo sapiens
gccctcagatcgtctcatacaaggg

SEQ ID NO: 13837 - DNA, 25 bp, Homo sapiens
ggaattattgtccagtgccaacccc

SEQ ID NO: 13838 - DNA, 25 bp, Homo sapiens
gtccctctacatgtctctttaatgg

SEQ ID NO: 13839 - DNA, 25 bp, Homo sapiens
tataggaatccttacttccccagta

SEQ ID NO: 13840 - DNA, 25 bp, Homo sapiens
tcaatggctgcaagagactcccacg

SEQ ID NO: 13841 - DNA, 25 bp, Homo sapiens
tccacttatttcgggtccgctaggt

SEQ ID NO: 13842 - DNA, 25 bp, Homo sapiens
agctggtcttcagaatacctacatt

SEQ ID NO: 13843 - DNA, 25 bp, Homo sapiens
atacaagtagtaatgacacaccaaa

SEQ ID NO: 13844 - DNA, 25 bp, Homo sapiens
catgcccagccggttaataattctt

SEQ ID NO: 13845 - DNA, 25 bp, Homo sapiens
catttctttatctacatattctgtc

SEQ ID NO: 13846 - DNA, 25 bp, Homo sapiens
gacttcttaaggatgctcaaaagct

SEQ ID NO: 13847 - DNA, 25 bp, Homo sapiens
gcagttgcgtgatttcagctcgctg

SEQ ID NO: 13848 - DNA, 25 bp, Homo sapiens
gtgtttaaggtactatggtctattt

SEQ ID NO: 13849 - DNA, 25 bp, Homo sapiens
gttaatatcttcatgacttcttaag

SEQ ID NO: 13850 - DNA, 25 bp, Homo sapiens
ttagcttttaagttggcttccaaat

SEQ ID NO: 13851 - DNA, 25 bp, Homo sapiens
ttgcgtgatttcagctcgctgcaac

SEQ ID NO: 13852 - DNA, 25 bp, Homo sapiens
tttggtctaatctttgttttactat

SEQ ID NO: 13853 - DNA, 25 bp, Homo sapiens
atgagagttctgtcacggtcacttt

SEQ ID NO: 13854 - DNA, 25 bp, Homo sapiens
gccattcttgctgaaccgtttgtga

SEQ ID NO: 13855 - DNA, 25 bp, Homo sapiens
gtgtctcaggtgtgccctgaaaccc

SEQ ID NO: 13856 - DNA, 25 bp, Homo sapiens
gtttgtgattgccatttgagctctg

SEQ ID NO: 13857 - DNA, 25 bp, Homo sapiens
tagcccatctttcaagggacctctc

SEQ ID NO: 13858 - DNA, 25 bp, Homo sapiens
tcatcacccagcacggggctaagca

SEQ ID NO: 13859 - DNA, 25 bp, Homo sapiens
tcatggcaggcatcgccattcttgc

SEQ ID NO: 13860 - DNA, 25 bp, Homo sapiens
tgagctctggaagcctctattgcca

SEQ ID NO: 13861 - DNA, 25 bp, Homo sapiens
tgtatttctacaccatgctctgagg

SEQ ID NO: 13862 - DNA, 25 bp, Homo sapiens
ttcctgagccctactgtgtctcagg

SEQ ID NO: 13863 - DNA, 25 bp, Homo sapiens
ttgtgtgcacatatccttagcccat

SEQ ID NO: 13864 - DNA, 25 bp, Homo sapiens
aattccctcatttaaacccaatcag

SEQ ID NO: 13865 - DNA, 25 bp, Homo sapiens
cttccttccacagttatcttagctg

SEQ ID NO: 13866 - DNA, 25 bp, Homo sapiens
ctttgtgagcctatgatattcccca

SEQ ID NO: 13867 - DNA, 25 bp, Homo sapiens
gaacagctctgagatcctggagtga

SEQ ID NO: 13868 - DNA, 25 bp, Homo sapiens
gagggtagccttgatttgttcttac

SEQ ID NO: 13869 - DNA, 25 bp, Homo sapiens
gagtttacgggtcttaggatgtctg

SEQ ID NO: 13870 - DNA, 25 bp, Homo sapiens
gcacaaacttcagaaacccggcttc

SEQ ID NO: 13871 - DNA, 25 bp, Homo sapiens
gtcgcacaatgtttgatgtccccaa

SEQ ID NO: 13872 - DNA, 25 bp, Homo sapiens
gtgggcaaactctctaaactggtac

SEQ ID NO: 13873 - DNA, 25 bp, Homo sapiens
tccccatttcctgtacaatcatgaa

SEQ ID NO: 13874 - DNA, 25 bp, Homo sapiens
tgagttctatcagttatcctttgtg

SEQ ID NO: 13875 - DNA, 25 bp, Homo sapiens
aatgcgggcatttaagtctgtccat

SEQ ID NO: 13876 - DNA, 25 bp, Homo sapiens
aattcggagctatacatatgtgcag

SEQ ID NO: 13877 - DNA, 25 bp, Homo sapiens
gaatattgtttttgcaccagacgaa

SEQ ID NO: 13878 - DNA, 25 bp, Homo sapiens
gggtgatgcacccattgtgattgtg

SEQ ID NO: 13879 - DNA, 25 bp, Homo sapiens
gtagctgtaagaatttcccagtgaa

SEQ ID NO: 13880 - DNA, 25 bp, Homo sapiens
gtctgtccattatctatatagtcct

SEQ ID NO: 13881 - DNA, 25 bp, Homo sapiens
gtgattcaaacttctgtgtactggg

SEQ ID NO: 13882 - DNA, 25 bp, Homo sapiens
gtgttctcggggatgcatagattca

SEQ ID NO: 13883 - DNA, 25 bp, Homo sapiens
tagctctgtagtggaatatgtcttc

SEQ ID NO: 13884 - DNA, 25 bp, Homo sapiens
tatatagtcctgtcttgtctattgt

SEQ ID NO: 13885 - DNA, 25 bp, Homo sapiens
tttctccaccttaaaaatgcgggca

SEQ ID NO: 13886 - DNA, 25 bp, Homo sapiens
aacttctatcccagagaggccaaag

SEQ ID NO: 13887 - DNA, 25 bp, Homo sapiens
atcttcccgccatctgatgagcagt

SEQ ID NO: 13888 - DNA, 25 bp, Homo sapiens
caaaggcagacttacgagaaaccac

SEQ ID NO: 13889 - DNA, 25 bp, Homo sapiens
cacccctgaacgctgagcaaaggca

SEQ ID NO: 13890 - DNA, 25 bp, Homo sapiens
cctccaatcgggtaactcccaggag

SEQ ID NO: 13891 - DNA, 25 bp, Homo sapiens
ggtaccagcagaaacctggccaggc

SEQ ID NO: 13892 - DNA, 25 bp, Homo sapiens
ggttcagtggcagtgggtctgggac

SEQ ID NO: 13893 - DNA, 25 bp, Homo sapiens
gtctccaggggaaagagccaccctc

SEQ ID NO: 13894 - DNA, 25 bp, Homo sapiens
gtgcctgctgaataacttctatccc

SEQ ID NO: 13895 - DNA, 25 bp, Homo sapiens
gtggaaggtggataacgccctccaa

SEQ ID NO: 13896 - DNA, 25 bp, Homo sapiens
tctcctgcagggccagtcagagtgt

SEQ ID NO: 13897 - DNA, 25 bp, Homo sapiens
aagcaacaacaagtacgcggccagc

SEQ ID NO: 13898 - DNA, 25 bp, Homo sapiens
aagtcccacagaagctacagctgcc

SEQ ID NO: 13899 - DNA, 25 bp, Homo sapiens
agtggcccctacagaatgttcatag

SEQ ID NO: 13900 - DNA, 25 bp, Homo sapiens
atgttcataggttctcaaccctcac

SEQ ID NO: 13901 - DNA, 25 bp, Homo sapiens
gagccgtgacagtggcctggaaggc

SEQ ID NO: 13902 - DNA, 25 bp, Homo sapiens
gcaccgtggagaagacagtggcccc

SEQ ID NO: 13903 - DNA, 25 bp, Homo sapiens
gcagccccgtcaaggcgggagtgga

SEQ ID NO: 13904 - DNA, 25 bp, Homo sapiens
gcctgacgcctgagcagtggaagtc

SEQ ID NO: 13905 - DNA, 25 bp, Homo sapiens
tacagctgccaggtcacgcatgaag

SEQ ID NO: 13906 - DNA, 25 bp, Homo sapiens
tcataagtgacttctacccgggagc

SEQ ID NO: 13907 - DNA, 25 bp, Homo sapiens
tggaaggcagatagcagccccgtca

SEQ ID NO: 13908 - DNA, 25 bp, Homo sapiens
caacgatttctcgtgagtgccgacc

SEQ ID NO: 13909 - DNA, 25 bp, Homo sapiens
ggccacgtgggcatgtggggtgtgt

SEQ ID NO: 13910 - DNA, 25 bp, Homo sapiens
taccttggtgaatctcacctgccaa

SEQ ID NO: 13911 - DNA, 25 bp, Homo sapiens
tgccagtggcacccaggggcaagga

SEQ ID NO: 13912 - DNA, 25 bp, Homo sapiens
tggggtgtgtgtttttaccttggtg

SEQ ID NO: 13913 - DNA, 25 bp, Homo sapiens
ataatgtccttcttcattgctgaga

SEQ ID NO: 13914 - DNA, 25 bp, Homo sapiens
catactgtcatactgctgggttttc

SEQ ID NO: 13915 - DNA, 25 bp, Homo sapiens
ccatggacacctgtttcattcactt

SEQ ID NO: 13916 - DNA, 25 bp, Homo sapiens
ctgtgtcaggcagtatgcttgtcct

SEQ ID NO: 13917 - DNA, 25 bp, Homo sapiens
gagagggcagccttagagctgtgga

SEQ ID NO: 13918 - DNA, 25 bp, Homo sapiens
gaggtggcaggtcgctaatgaatat

SEQ ID NO: 13919 - DNA, 25 bp, Homo sapiens
gtttcattcactttagcatcacagt

SEQ ID NO: 13920 - DNA, 25 bp, Homo sapiens
tactgctgggttttcatgggtagga

SEQ ID NO: 13921 - DNA, 25 bp, Homo sapiens
tagagctgtggatttctgcatcccc

SEQ ID NO: 13922 - DNA, 25 bp, Homo sapiens
tctaagaaggatagtcccccctaca

SEQ ID NO: 13923 - DNA, 25 bp, Homo sapiens
tgggtaggaaagcttgtcctgaccc

SEQ ID NO: 13924 - DNA, 25 bp, Homo sapiens
aagaaaagagtcctccagaccagcc

SEQ ID NO: 13925 - DNA, 25 bp, Homo sapiens
agaagagtgactcctgaaagccctg

SEQ ID NO: 13926 - DNA, 25 bp, Homo sapiens
cactcggcttcccaatgttagagaa

SEQ ID NO: 13927 - DNA, 25 bp, Homo sapiens
gacagtgatgctgccacctttaagc

SEQ ID NO: 13928 - DNA, 25 bp, Homo sapiens
gaccgtgagctggaggagtaccgca

SEQ ID NO: 13929 - DNA, 25 bp, Homo sapiens
gctggaggaagaccttgtgccggag

SEQ ID NO: 13930 - DNA, 25 bp, Homo sapiens
ggaccctggcagcgatgggtctcca

SEQ ID NO: 13931 - DNA, 25 bp, Homo sapiens
taccccgtcctttctgaagaagagc

SEQ ID NO: 13932 - DNA, 25 bp, Homo sapiens
tcccagcactcccatcaagctggag

SEQ ID NO: 13933 - DNA, 25 bp, Homo sapiens
tctgtcccctgatgaaccttcagaa

SEQ ID NO: 13934 - DNA, 25 bp, Homo sapiens
tgccggagccgactactggagatga

SEQ ID NO: 13935 - DNA, 25 bp, Homo sapiens
aatgctcagttcccatcaacatttc

SEQ ID NO: 13936 - DNA, 25 bp, Homo sapiens
atacgcactccttgaaatggcttct

SEQ ID NO: 13937 - DNA, 25 bp, Homo sapiens
attgaaacggatgccacccttgaag

SEQ ID NO: 13938 - DNA, 25 bp, Homo sapiens
ccgggccttttgttgcagtcaaatg

SEQ ID NO: 13939 - DNA, 25 bp, Homo sapiens
ctaaagcaatttggcattctcccac

SEQ ID NO: 13940 - DNA, 25 bp, Homo sapiens
gctatgtgcgtcttcagtagttcca

SEQ ID NO: 13941 - DNA, 25 bp, Homo sapiens
taccttttagctcagtgtggccggg

SEQ ID NO: 13942 - DNA, 25 bp, Homo sapiens
tcctcagtatcgttcatgtctttgg

SEQ ID NO: 13943 - DNA, 25 bp, Homo sapiens
tctcataaccccacagtttacctga

SEQ ID NO: 13944 - DNA, 25 bp, Homo sapiens
ttctcccactgtgatttgtgacttt

SEQ ID NO: 13945 - DNA, 25 bp, Homo sapiens
tttactggcgggaatgctcactctt

SEQ ID NO: 13946 - DNA, 25 bp, Homo sapiens
agccgattatcttcattgcttttaa

SEQ ID NO: 13947 - DNA, 25 bp, Homo sapiens
atccatgtgtggttaagctctgtgt

SEQ ID NO: 13948 - DNA, 25 bp, Homo sapiens
catacttttcagactgcctttcttt

SEQ ID NO: 13949 - DNA, 25 bp, Homo sapiens
ccaaatgagtccatacccatcttca

SEQ ID NO: 13950 - DNA, 25 bp, Homo sapiens
ctccaaccttccagaaagccgatta

SEQ ID NO: 13951 - DNA, 25 bp, Homo sapiens
ctgtggcatatggttttctgttact

SEQ ID NO: 13952 - DNA, 25 bp, Homo sapiens
gccacaccaaaaccagactcaattt

SEQ ID NO: 13953 - DNA, 25 bp, Homo sapiens
tccacataatgcataagccacacca

SEQ ID NO: 13954 - DNA, 25 bp, Homo sapiens
tggtaaagcaccagtactccaacct

SEQ ID NO: 13955 - DNA, 25 bp, Homo sapiens
tttcgttgtcaaaatgccataccca

SEQ ID NO: 13956 - DNA, 25 bp, Homo sapiens
ttttgtaattcttgtccacttgtaa

SEQ ID NO: 13957 - DNA, 25 bp, Homo sapiens
aaccgatgagcaacctcactcttgt

SEQ ID NO: 13958 - DNA, 25 bp, Homo sapiens
aagcattcatttctctcaggttctt

SEQ ID NO: 13959 - DNA, 25 bp, Homo sapiens
aaggatgtcttctggcaatttcata

SEQ ID NO: 13960 - DNA, 25 bp, Homo sapiens
cacacccctggaataagccgagcta

SEQ ID NO: 13961 - DNA, 25 bp, Homo sapiens
ctgactcatcagcaacacatgtttt

SEQ ID NO: 13962 - DNA, 25 bp, Homo sapiens
gaggtttgggttgtcatctttgtgt

SEQ ID NO: 13963 - DNA, 25 bp, Homo sapiens
tcactcttgtgtgcatctcgacgaa

SEQ ID NO: 13964 - DNA, 25 bp, Homo sapiens
tctctcaggttcttgttttgcacag

SEQ ID NO: 13965 - DNA, 25 bp, Homo sapiens
tgtgcatctcgacgaaacacacccc

SEQ ID NO: 13966 - DNA, 25 bp, Homo sapiens
ttctcccaaatctttaaaccgatga

SEQ ID NO: 13967 - DNA, 25 bp, Homo sapiens
ttgcaactgtgcataatttgtctcc

SEQ ID NO: 13968 - DNA, 25 bp, Homo sapiens
aagtgttgtgcaaactggacatagc

SEQ ID NO: 13969 - DNA, 25 bp, Homo sapiens
atttgtagcctacttatttgtgttt

SEQ ID NO: 13970 - DNA, 25 bp, Homo sapiens
cgggcacaagtgactatactgaaga

SEQ ID NO: 13971 - DNA, 25 bp, Homo sapiens
gagttcatgatgtagatgtctggtt

SEQ ID NO: 13972 - DNA, 25 bp, Homo sapiens
gcacatactacttcagagttcatga

SEQ ID NO: 13973 - DNA, 25 bp, Homo sapiens
ggacatagcagcacatactacttca

SEQ ID NO: 13974 - DNA, 25 bp, Homo sapiens
ggctgctacgggcacaagtgactat

SEQ ID NO: 13975 - DNA, 25 bp, Homo sapiens
taaactttctaattcaattccattt

SEQ ID NO: 13976 - DNA, 25 bp, Homo sapiens
tagatgtctggtttctgcttacgtc

SEQ ID NO: 13977 - DNA, 25 bp, Homo sapiens
tcacatggctgctacgggcacaagt

SEQ ID NO: 13978 - DNA, 25 bp, Homo sapiens
tttctttatcacatggctgctacgg

SEQ ID NO: 13979 - DNA, 25 bp, Homo sapiens
acaggaagtcggcacatctccaggt

SEQ ID NO: 13980 - DNA, 25 bp, Homo sapiens
actcgattcctgcggtaactctgag

SEQ ID NO: 13981 - DNA, 25 bp, Homo sapiens
cggtaactctgagccctgaaatcct

SEQ ID NO: 13982 - DNA, 25 bp, Homo sapiens
ctcagtctccttggcggggaagatt

SEQ ID NO: 13983 - DNA, 25 bp, Homo sapiens
ctgagccctgaaatcctcagtctcc

SEQ ID NO: 13984 - DNA, 25 bp, Homo sapiens
gcggggaagattggctttggggaca

SEQ ID NO: 13985 - DNA, 25 bp, Homo sapiens
ggctttggggacaggaagtcggcac

SEQ ID NO: 13986 - DNA, 25 bp, Homo sapiens
gggtgggggcagggcatgagttccc

SEQ ID NO: 13987 - DNA, 25 bp, Homo sapiens
tcgattcctgcggtaactctgagcc

SEQ ID NO: 13988 - DNA, 25 bp, Homo sapiens
tgggggcagggcatgagttccccag

SEQ ID NO: 13989 - DNA, 25 bp, Homo sapiens
ttccccagtccccaaggaaaggcag

SEQ ID NO: 13990 - DNA, 25 bp, Homo sapiens
caacctcgcccagttcgaaggcggg

SEQ ID NO: 13991 - DNA, 25 bp, Homo sapiens
caatgccacggactactggacgttc

SEQ ID NO: 13992 - DNA, 25 bp, Homo sapiens
ccgggacgagatcattgcttggcac

SEQ ID NO: 13993 - DNA, 25 bp, Homo sapiens
cttcgcggaattcgtcctgcattta

SEQ ID NO: 13994 - DNA, 25 bp, Homo sapiens
gaatgttgcctactttcgatttgac

SEQ ID NO: 13995 - DNA, 25 bp, Homo sapiens
gacgttccggaagatgttcaccatc

SEQ ID NO: 13996 - DNA, 25 bp, Homo sapiens
ggcattctgaaaacggttctccggg

SEQ ID NO: 13997 - DNA, 25 bp, Homo sapiens
gtccctggttcagaaagccgtcacc

SEQ ID NO: 13998 - DNA, 25 bp, Homo sapiens
taaacgacgcgactggagacctgga

SEQ ID NO: 13999 - DNA, 25 bp, Homo sapiens
tcacgcccaacatttctgagtttct

SEQ ID NO: 14000 - DNA, 25 bp, Homo sapiens
tgacagcgtccatgattgcggtcgc

SEQ ID NO: 14001 - DNA, 25 bp, Homo sapiens
actatttcttaacatgattcatttc

SEQ ID NO: 14002 - DNA, 25 bp, Homo sapiens
agagctgtagctagccctgaaaaga

SEQ ID NO: 14003 - DNA, 25 bp, Homo sapiens
attctagccacatttaaattgcatt

SEQ ID NO: 14004 - DNA, 25 bp, Homo sapiens
ctcattcatttgttctatatagcat

SEQ ID NO: 14005 - DNA, 25 bp, Homo sapiens
ggacattttgaacactaccttaagt

SEQ ID NO: 14006 - DNA, 25 bp, Homo sapiens
ggccttgctagtcaattctagccac

SEQ ID NO: 14007 - DNA, 25 bp, Homo sapiens
gtagtaaaaacaggctccacgaagg

SEQ ID NO: 14008 - DNA, 25 bp, Homo sapiens
gttatttacattactcattcatttg

SEQ ID NO: 14009 - DNA, 25 bp, Homo sapiens
tagcatgtctatttacttttatcaa

SEQ ID NO: 14010 - DNA, 25 bp, Homo sapiens
tgtggtatgcaaaagcccctttgtg

SEQ ID NO: 14011 - DNA, 25 bp, Homo sapiens
tttctcatacccaggttatgtggta

SEQ ID NO: 14012 - DNA, 25 bp, Homo sapiens
atagattctctcctgattatttatc

SEQ ID NO: 14013 - DNA, 25 bp, Homo sapiens
attatttatcacatagccccttagc

SEQ ID NO: 14014 - DNA, 25 bp, Homo sapiens
gaacgtgggagttcagctgcttctc

SEQ ID NO: 14015 - DNA, 25 bp, Homo sapiens
gatgggggatgcttcatgtgaacgt

SEQ ID NO: 14016 - DNA, 25 bp, Homo sapiens
gctgcttctgctatatttgtgatat

SEQ ID NO: 14017 - DNA, 25 bp, Homo sapiens
gtttcttcgtgcctgttttatgtgc

SEQ ID NO: 14018 - DNA, 25 bp, Homo sapiens
tacacacgtttgtttcttcgtgcct

SEQ ID NO: 14019 - DNA, 25 bp, Homo sapiens
tagccccttagccagttgtatatta

SEQ ID NO: 14020 - DNA, 25 bp, Homo sapiens
tgtaagcacttttacggggcgggtg

SEQ ID NO: 14021 - DNA, 25 bp, Homo sapiens
ttcctttcctgatcactatgcattt

SEQ ID NO: 14022 - DNA, 25 bp, Homo sapiens
ttctttttttgtccacgtatctttg

SEQ ID NO: 14023 - DNA, 25 bp, Homo sapiens
aagccaattgccttagggtgggtca

SEQ ID NO: 14024 - DNA, 25 bp, Homo sapiens
aattcgacggtcatttgtgtgactg

SEQ ID NO: 14025 - DNA, 25 bp, Homo sapiens
agggtgggtcacaattcgacggtca

SEQ ID NO: 14026 - DNA, 25 bp, Homo sapiens
ctctcggctggggctcagtagatgc

SEQ ID NO: 14027 - DNA, 25 bp, Homo sapiens
gacggtcatttgtgtgactgagtgg

SEQ ID NO: 14028 - DNA, 25 bp, Homo sapiens
gccttagggtgggtcacaattcgac

SEQ ID NO: 14029 - DNA, 25 bp, Homo sapiens
ggctcagtagatgctccatagggaa

SEQ ID NO: 14030 - DNA, 25 bp, Homo sapiens
gggtcacaattcgacggtcatttgt

SEQ ID NO: 14031 - DNA, 25 bp, Homo sapiens
ggtgggtcacaattcgacggtcatt

SEQ ID NO: 14032 - DNA, 25 bp, Homo sapiens
gtagatgctccatagggaaataaaa

SEQ ID NO: 14033 - DNA, 25 bp, Homo sapiens
taagtgccttgagagcagccagcag

SEQ ID NO: 14034 - DNA, 25 bp, Homo sapiens
acaacacgattgtattttggcaagc

SEQ ID NO: 14035 - DNA, 25 bp, Homo sapiens
agactggaccctggtttgatgaacc

SEQ ID NO: 14036 - DNA, 25 bp, Homo sapiens
agggacggcttgatgggagaggctg

SEQ ID NO: 14037 - DNA, 25 bp, Homo sapiens
cagacccttgaaggaaggtgctccc

SEQ ID NO: 14038 - DNA, 25 bp, Homo sapiens
ccccgaagatgggcctcgagtggtc

SEQ ID NO: 14039 - DNA, 25 bp, Homo sapiens
gagtatgccctggactggatattaa

SEQ ID NO: 14040 - DNA, 25 bp, Homo sapiens
gataaccagatgcaacgtgaagatc

SEQ ID NO: 14041 - DNA, 25 bp, Homo sapiens
gcaccccaacgtggcaggggctgag

SEQ ID NO: 14042 - DNA, 25 bp, Homo sapiens
gcctcgagtggtcttcatcgtggac

SEQ ID NO: 14043 - DNA, 25 bp, Homo sapiens
ggagaaaccggagtatgccctggac

SEQ ID NO: 14044 - DNA, 25 bp, Homo sapiens
gtgaagatctagactggaccctggt

SEQ ID NO: 14045 - DNA, 25 bp, Homo sapiens
aagcgtagacaaggagatgcaggta

SEQ ID NO: 14046 - DNA, 25 bp, Homo sapiens
aatgaccacctagagccttggatcc

SEQ ID NO: 14047 - DNA, 25 bp, Homo sapiens
agagctttgaacaggtagtgaatga

SEQ ID NO: 14048 - DNA, 25 bp, Homo sapiens
agtgaatgaactcttccgggatggg

SEQ ID NO: 14049 - DNA, 25 bp, Homo sapiens
gcaggtattggtgagtcggatcgca

SEQ ID NO: 14050 - DNA, 25 bp, Homo sapiens
ggcactgtgcgtggaaagcgtagac

SEQ ID NO: 14051 - DNA, 25 bp, Homo sapiens
tgagtcggatcgcagcttggatggc

SEQ ID NO: 14052 - DNA, 25 bp, Homo sapiens
tggccacttacctgaatgaccacct

SEQ ID NO: 14053 - DNA, 25 bp, Homo sapiens
tggggtaaactggggtcgcattgtg

SEQ ID NO: 14054 - DNA, 25 bp, Homo sapiens
ttacctgaatgaccacctagagcct

SEQ ID NO: 14055 - DNA, 25 bp, Homo sapiens
ttcggcggggcactgtgcgtggaaa

SEQ ID NO: 14056 - DNA, 25 bp, Homo sapiens
caaggggtttattacctgatcattt

SEQ ID NO: 14057 - DNA, 25 bp, Homo sapiens
ccatctctctttctgggagtttaga

SEQ ID NO: 14058 - DNA, 25 bp, Homo sapiens
ctttctgggagtttagacaatgttg

SEQ ID NO: 14059 - DNA, 25 bp, Homo sapiens
gacagttctctatgcttaacttatt

SEQ ID NO: 14060 - DNA, 25 bp, Homo sapiens
gatcattttctttaggaagaggttt

SEQ ID NO: 14061 - DNA, 25 bp, Homo sapiens
ggagaccggggagtcagtttcagac

SEQ ID NO: 14062 - DNA, 25 bp, Homo sapiens
ggggagtcagtttcagacagttctc

SEQ ID NO: 14063 - DNA, 25 bp, Homo sapiens
ggtcaaggggtttattacctgatca

SEQ ID NO: 14064 - DNA, 25 bp, Homo sapiens
gtttcagacagttctctatgcttaa

SEQ ID NO: 14065 - DNA, 25 bp, Homo sapiens
tgctttggggggtaattgggtattg

SEQ ID NO: 14066 - DNA, 25 bp, Homo sapiens
tggtaaggggagaccggggagtcag

SEQ ID NO: 14067 - DNA, 25 bp, Homo sapiens
agaggctgggaggttgggaggctgt

SEQ ID NO: 14068 - DNA, 25 bp, Homo sapiens
agtgactgaattctgccttggttct

SEQ ID NO: 14069 - DNA, 25 bp, Homo sapiens
ccctcctgcccacgggaggacaagc

SEQ ID NO: 14070 - DNA, 25 bp, Homo sapiens
cttcctctctggatactgcaaaggc

SEQ ID NO: 14071 - DNA, 25 bp, Homo sapiens
cttggaggaggatgccacgcacttc

SEQ ID NO: 14072 - DNA, 25 bp, Homo sapiens
gaacctgtgctcatttctgcaattt

SEQ ID NO: 14073 - DNA, 25 bp, Homo sapiens
gacgaaaccgtcttggttgtccttg

SEQ ID NO: 14074 - DNA, 25 bp, Homo sapiens
gtgagccacagtgctcttgaacctg

SEQ ID NO: 14075 - DNA, 25 bp, Homo sapiens
tagggattgtccctgtgttgtccca

SEQ ID NO: 14076 - DNA, 25 bp, Homo sapiens
tcctcagctgcatggagcctggaac

SEQ ID NO: 14077 - DNA, 25 bp, Homo sapiens
aactctgacagtagtgtgtttctga

SEQ ID NO: 14078 - DNA, 25 bp, Homo sapiens
aactgtcttacaacgagggggtgtg

SEQ ID NO: 14079 - DNA, 25 bp, Homo sapiens
aatacctgccaagattaatacccaa

SEQ ID NO: 14080 - DNA, 25 bp, Homo sapiens
agagaggtcagagcagatcaatact

SEQ ID NO: 14081 - DNA, 25 bp, Homo sapiens
ggaacacaatcaagcaacctttcag

SEQ ID NO: 14082 - DNA, 25 bp, Homo sapiens
gtagtattactgtctgaaactggtc

SEQ ID NO: 14083 - DNA, 25 bp, Homo sapiens
gtcatctagacgttgagccaggaac

SEQ ID NO: 14084 - DNA, 25 bp, Homo sapiens
taatacccaatcaaatgccatgact

SEQ ID NO: 14085 - DNA, 25 bp, Homo sapiens
tgagatccagacagaacagtcccca

SEQ ID NO: 14086 - DNA, 25 bp, Homo sapiens
tggtcagtttttaggggcaacttca

SEQ ID NO: 14087 - DNA, 25 bp, Homo sapiens
tttcaggatatagccaggccccaag

SEQ ID NO: 14088 - DNA, 25 bp, Homo sapiens
aaccagcagatattcctgcgggaca

SEQ ID NO: 14089 - DNA, 25 bp, Homo sapiens
agaattaaacccacaagctgcctct

SEQ ID NO: 14090 - DNA, 25 bp, Homo sapiens
attacaaattttcactgctgctcct

SEQ ID NO: 14091 - DNA, 25 bp, Homo sapiens
cacaagctgcctctgacagcagcct

SEQ ID NO: 14092 - DNA, 25 bp, Homo sapiens
gaaaggagcttgccacgggcagacc

SEQ ID NO: 14093 - DNA, 25 bp, Homo sapiens
gccacgtatagtcctagctgacgcc

SEQ ID NO: 14094 - DNA, 25 bp, Homo sapiens
gcttccgccggggagattttatcca

SEQ ID NO: 14095 - DNA, 25 bp, Homo sapiens
gtcatggataactcagaccccaact

SEQ ID NO: 14096 - DNA, 25 bp, Homo sapiens
tctgtccatcagtgcatgacgttta

SEQ ID NO: 14097 - DNA, 25 bp, Homo sapiens
tgaccctctcactttggttggaact

SEQ ID NO: 14098 - DNA, 25 bp, Homo sapiens
tgcgggacatagaacaggtgccaca

SEQ ID NO: 14099 - DNA, 25 bp, Homo sapiens
agagccatttattctctgcatgctc

SEQ ID NO: 14100 - DNA, 25 bp, Homo sapiens
agctaaatgccacctagagttattg

SEQ ID NO: 14101 - DNA, 25 bp, Homo sapiens
agctgttttagctaaatgccaccta

SEQ ID NO: 14102 - DNA, 25 bp, Homo sapiens
atgtccaggagcagctgtaacctgt

SEQ ID NO: 14103 - DNA, 25 bp, Homo sapiens
gccacctagagttattggaggtctg

SEQ ID NO: 14104 - DNA, 25 bp, Homo sapiens
ggagcagctgtaacctgtagggaaa

SEQ ID NO: 14105 - DNA, 25 bp, Homo sapiens
gggtcagttcttagatttctttctt

SEQ ID NO: 14106 - DNA, 25 bp, Homo sapiens
tattctctgcatgctctagataaaa

SEQ ID NO: 14107 - DNA, 25 bp, Homo sapiens
tgacaattcagagccatttattctc

SEQ ID NO: 14108 - DNA, 25 bp, Homo sapiens
tggccctcatagtgttaagcacaaa

SEQ ID NO: 14109 - DNA, 25 bp, Homo sapiens
tgtgctggccctcatagtgttaagc

SEQ ID NO: 14110 - DNA, 25 bp, Homo sapiens
caatcagcagacagcagtggtactt

SEQ ID NO: 14111 - DNA, 25 bp, Homo sapiens
ctagtgtgtctgatcagtgacttct

SEQ ID NO: 14112 - DNA, 25 bp, Homo sapiens
gctctgaggcctcctatgagctgac

SEQ ID NO: 14113 - DNA, 25 bp, Homo sapiens
ggagtccaggcagaagacgaggctg

SEQ ID NO: 14114 - DNA, 25 bp, Homo sapiens
ggcagaagacgaggctgactattac

SEQ ID NO: 14115 - DNA, 25 bp, Homo sapiens
ggcccctgtgctggtgatatataaa

SEQ ID NO: 14116 - DNA, 25 bp, Homo sapiens
gggacaacagtcacgttgaccatca

SEQ ID NO: 14117 - DNA, 25 bp, Homo sapiens
gtcacgttgaccatcagtggagtcc

SEQ ID NO: 14118 - DNA, 25 bp, Homo sapiens
gttgaccatcagtggagtccaggca

SEQ ID NO: 14119 - DNA, 25 bp, Homo sapiens
taaagacagtgagaggccctcaggg

SEQ ID NO: 14120 - DNA, 25 bp, Homo sapiens
tgactattactgtcaatcagcagac

SEQ ID NO: 14121 - DNA, 25 bp, Homo sapiens
accaatcttttcctctgaggcttct

SEQ ID NO: 14122 - DNA, 25 bp, Homo sapiens
acgtttcctgaaagtcattctaagt

SEQ ID NO: 14123 - DNA, 25 bp, Homo sapiens
ccatttctgttacgtgaacttcact

SEQ ID NO: 14124 - DNA, 25 bp, Homo sapiens
cttctgttgcgtaagccatttctgt

SEQ ID NO: 14125 - DNA, 25 bp, Homo sapiens
gagacacggtgaggtgggctgggca

SEQ ID NO: 14126 - DNA, 25 bp, Homo sapiens
gatgtaatggatccaccaatctttt

SEQ ID NO: 14127 - DNA, 25 bp, Homo sapiens
gtcgccagcctttccaaggtaatta

SEQ ID NO: 14128 - DNA, 25 bp, Homo sapiens
gtgaacttcactctcaggaatttga

SEQ ID NO: 14129 - DNA, 25 bp, Homo sapiens
tcttccttttgtagtgactaaaaat

SEQ ID NO: 14130 - DNA, 25 bp, Homo sapiens
tgggcaagaaaaatacgtttcctga

SEQ ID NO: 14131 - DNA, 25 bp, Homo sapiens
ttcctctgaggcttctgttgcgtaa

SEQ ID NO: 14132 - DNA, 25 bp, Homo sapiens
agcacagggcaccaactggacagag

SEQ ID NO: 14133 - DNA, 25 bp, Homo sapiens
atttagcagagcacggtgtccctgg

SEQ ID NO: 14134 - DNA, 25 bp, Homo sapiens
caaacatctctccagagtcagcctc

SEQ ID NO: 14135 - DNA, 25 bp, Homo sapiens
caactttgctttggacagtgacacc

SEQ ID NO: 14136 - DNA, 25 bp, Homo sapiens
caagaatactcacccctttacttag

SEQ ID NO: 14137 - DNA, 25 bp, Homo sapiens
ctggggcatggcttcagagcaccag

SEQ ID NO: 14138 - DNA, 25 bp, Homo sapiens
gcagaactcccagggaggcactggg

SEQ ID NO: 14139 - DNA, 25 bp, Homo sapiens
gtagctggagtcatcatttagcaga

SEQ ID NO: 14140 - DNA, 25 bp, Homo sapiens
tcatctcttggcctcgggaaatgta

SEQ ID NO: 14141 - DNA, 25 bp, Homo sapiens
tctcactggacagcatcacctggac

SEQ ID NO: 14142 - DNA, 25 bp, Homo sapiens
tggacagcatcacctggacacagag

SEQ ID NO: 14143 - DNA, 25 bp, Homo sapiens
aaatcgctcatgcttagttgtggta

SEQ ID NO: 14144 - DNA, 25 bp, Homo sapiens
aattgggcaggctcttgggaagtag

SEQ ID NO: 14145 - DNA, 25 bp, Homo sapiens
agctcttctaacacccatatcagtg

SEQ ID NO: 14146 - DNA, 25 bp, Homo sapiens
agtctctttcatacagcacagcaaa

SEQ ID NO: 14147 - DNA, 25 bp, Homo sapiens
ccatatcagtgtctgtttctctgca

SEQ ID NO: 14148 - DNA, 25 bp, Homo sapiens
ccctgttggtggagctctgggggca

SEQ ID NO: 14149 - DNA, 25 bp, Homo sapiens
gacaatgtgtttcctgtgcactcgt

SEQ ID NO: 14150 - DNA, 25 bp, Homo sapiens
gaggacaactgcatgcttagatctg

SEQ ID NO: 14151 - DNA, 25 bp, Homo sapiens
gcctttgtctctatgcttctaaaat

SEQ ID NO: 14152 - DNA, 25 bp, Homo sapiens
gtgaaggttttgactgtggagctct

SEQ ID NO: 14153 - DNA, 25 bp, Homo sapiens
tgtggtatggatgtcttccgcagtg

SEQ ID NO: 14154 - DNA, 25 bp, Homo sapiens
agctagccaattccatagtgctccc

SEQ ID NO: 14155 - DNA, 25 bp, Homo sapiens
agtgctcccttttgattgtcgagat

SEQ ID NO: 14156 - DNA, 25 bp, Homo sapiens
tgtcatctatgctccaagcagccac

SEQ ID NO: 14157 - DNA, 25 bp, Homo sapiens
ccgcatcatccgtgacgacatgctg

SEQ ID NO: 14158 - DNA, 25 bp, Homo sapiens
gatgtggacaatgatgagcccctcc

SEQ ID NO: 14159 - DNA, 25 bp, Homo sapiens
gctggaggagcccgtgaacatctcc

SEQ ID NO: 14160 - DNA, 25 bp, Homo sapiens
gtcacctactacttggactggatcc

SEQ ID NO: 14161 - DNA, 25 bp, Homo sapiens
aacatagcattaaggtggacagcca

SEQ ID NO: 14162 - DNA, 25 bp, Homo sapiens
acatccgtgtgtaatatcccgagaa

SEQ ID NO: 14163 - DNA, 25 bp, Homo sapiens
cacacattgcgaacaacatgttggg

SEQ ID NO: 14164 - DNA, 25 bp, Homo sapiens
ccaccaaaatgcttacatccgtgtg

SEQ ID NO: 14165 - DNA, 25 bp, Homo sapiens
gaaccacctcaatgcaaagattcta

SEQ ID NO: 14166 - DNA, 25 bp, Homo sapiens
gaatttgtgtgtaaacggggatatc

SEQ ID NO: 14167 - DNA, 25 bp, Homo sapiens
gagggtaacaagcgaataacatgta

SEQ ID NO: 14168 - DNA, 25 bp, Homo sapiens
gcattaaggtggacagccaaacaga

SEQ ID NO: 14169 - DNA, 25 bp, Homo sapiens
tattcatacgtaaaattttggatta

SEQ ID NO: 14170 - DNA, 25 bp, Homo sapiens
tcacgttctcacacattgcgaacaa

SEQ ID NO: 14171 - DNA, 25 bp, Homo sapiens
tccgtgtgtaatatcccgagaaatt

SEQ ID NO: 14172 - DNA, 25 bp, Homo sapiens
aaagcgctttggtggagcacccagc

SEQ ID NO: 14173 - DNA, 25 bp, Homo sapiens
agcccagacccgattcgaggggagg

SEQ ID NO: 14174 - DNA, 25 bp, Homo sapiens
agtgaactcagaacgcactgcacac

SEQ ID NO: 14175 - DNA, 25 bp, Homo sapiens
ctcagagctgccaaaaaccatcact

SEQ ID NO: 14176 - DNA, 25 bp, Homo sapiens
ggcctgcagaggttgaaagcgcttt

SEQ ID NO: 14177 - DNA, 25 bp, Homo sapiens
ggtgaaggcctttattgtcctgacc

SEQ ID NO: 14178 - DNA, 25 bp, Homo sapiens
ggtgaggacgagggtggggcattga

SEQ ID NO: 14179 - DNA, 25 bp, Homo sapiens
gtcccatgacaaggatcagctgacc

SEQ ID NO: 14180 - DNA, 25 bp, Homo sapiens
ttaatgcctctgggtatcgcatcgg

SEQ ID NO: 14181 - DNA, 25 bp, Homo sapiens
ttagaatttcccaggtgagcactca

SEQ ID NO: 14182 - DNA, 25 bp, Homo sapiens
ttagtctccccactatggtgaggac

SEQ ID NO: 14183 - DNA, 25 bp, Homo sapiens
aaggcactctagtctttgcagaaaa

SEQ ID NO: 14184 - DNA, 25 bp, Homo sapiens
aatgatagttcgactcgtctgtgga

SEQ ID NO: 14185 - DNA, 25 bp, Homo sapiens
acctgaatgtacattgcacaatgcc

SEQ ID NO: 14186 - DNA, 25 bp, Homo sapiens
accttggtgtacatgctcacagagg

SEQ ID NO: 14187 - DNA, 25 bp, Homo sapiens
atcatgatgcctgctaaggcagcca

SEQ ID NO: 14188 - DNA, 25 bp, Homo sapiens
gaaatgcaagatccacaactagatg

SEQ ID NO: 14189 - DNA, 25 bp, Homo sapiens
gactcgtctgtggaagaacttacaa

SEQ ID NO: 14190 - DNA, 25 bp, Homo sapiens
gatggaaggcactctagtctttgca

SEQ ID NO: 14191 - DNA, 25 bp, Homo sapiens
gctccagtatgccatcatgatgcct

SEQ ID NO: 14192 - DNA, 25 bp, Homo sapiens
ggaagaaagtccttgtcctttgaga

SEQ ID NO: 14193 - DNA, 25 bp, Homo sapiens
ggcagccaccttggtgtacatgctc

SEQ ID NO: 14194 - DNA, 25 bp, Homo sapiens
agacatttgacgttgcgctgtccga

SEQ ID NO: 14195 - DNA, 25 bp, Homo sapiens
agctccatgcggcactgagtgagtg

SEQ ID NO: 14196 - DNA, 25 bp, Homo sapiens
atttctggtcaaggagcgagctctc

SEQ ID NO: 14197 - DNA, 25 bp, Homo sapiens
cacgcaagcctctgtagggggtgga

SEQ ID NO: 14198 - DNA, 25 bp, Homo sapiens
cgaaggcaccagttcagccaggagt

SEQ ID NO: 14199 - DNA, 25 bp, Homo sapiens
gaacacggggagcggtggtgctaca

SEQ ID NO: 14200 - DNA, 25 bp, Homo sapiens
gaggttccttcaagctaagccagct

SEQ ID NO: 14201 - DNA, 25 bp, Homo sapiens
gatccgggcttggttttgtgaggtt

SEQ ID NO: 14202 - DNA, 25 bp, Homo sapiens
gtgagtggctgacagcgatccgggc

SEQ ID NO: 14203 - DNA, 25 bp, Homo sapiens
taagcagctgtttaccgaaggcacc

SEQ ID NO: 14204 - DNA, 25 bp, Homo sapiens
tcccaacccctcatatcagcaaggg

SEQ ID NO: 14205 - DNA, 25 bp, Homo sapiens
aaaatccatttgcagatcctagtta

SEQ ID NO: 14206 - DNA, 25 bp, Homo sapiens
agatcctagttattctcaatatttt

SEQ ID NO: 14207 - DNA, 25 bp, Homo sapiens
ctgtcttccactggtacaccataaa

SEQ ID NO: 14208 - DNA, 25 bp, Homo sapiens
cttctcctccaacatagttttattc

SEQ ID NO: 14209 - DNA, 25 bp, Homo sapiens
gaattcctgtagagtttgttgttcc

SEQ ID NO: 14210 - DNA, 25 bp, Homo sapiens
ggacaacaacattagccactgctga

SEQ ID NO: 14211 - DNA, 25 bp, Homo sapiens
ggtacaccataaatcagcagctaaa

SEQ ID NO: 14212 - DNA, 25 bp, Homo sapiens
gtgtgctgtaaactcacccaaaatg

SEQ ID NO: 14213 - DNA, 25 bp, Homo sapiens
tattcattttctttggtattagtgt

SEQ ID NO: 14214 - DNA, 25 bp, Homo sapiens
tctggttgtcaggttttgtctctcc

SEQ ID NO: 14215 - DNA, 25 bp, Homo sapiens
ttgtcaggttttgtctctcctgtct

SEQ ID NO: 14216 - DNA, 25 bp, Homo sapiens
cccctgatcagcagcggaggagcgc

SEQ ID NO: 14217 - DNA, 25 bp, Homo sapiens
ccggtgagcaggtgtgatcccaggg

SEQ ID NO: 14218 - DNA, 25 bp, Homo sapiens
cctccggtgagcaggtgtgatccca

SEQ ID NO: 14219 - DNA, 25 bp, Homo sapiens
cgggggaggggaagctcacagaccg

SEQ ID NO: 14220 - DNA, 25 bp, Homo sapiens
gctgggccaggcagaggggcgagat

SEQ ID NO: 14221 - DNA, 25 bp, Homo sapiens
ggcaactcgggggaggggaagctca

SEQ ID NO: 14222 - DNA, 25 bp, Homo sapiens
taagctgggccaggcagaggggcga

SEQ ID NO: 14223 - DNA, 25 bp, Homo sapiens
tcatccaggcaactcgggggagggg

SEQ ID NO: 14224 - DNA, 25 bp, Homo sapiens
tgcctacgtctaagctgggccaggc

SEQ ID NO: 14225 - DNA, 25 bp, Homo sapiens
acggatttagacgaggttcgaggct

SEQ ID NO: 14226 - DNA, 25 bp, Homo sapiens
actatctcttgggagcccccaaaag

SEQ ID NO: 14227 - DNA, 25 bp, Homo sapiens
cagaagggctatagctggtcccaga

SEQ ID NO: 14228 - DNA, 25 bp, Homo sapiens
cctgctgcttggccacagcagtggc

SEQ ID NO: 14229 - DNA, 25 bp, Homo sapiens
ctgctgtgaccacaggctcaggtcc

SEQ ID NO: 14230 - DNA, 25 bp, Homo sapiens
gaagctttgcccagatgaagccagg

SEQ ID NO: 14231 - DNA, 25 bp, Homo sapiens
gccagaggcgctacgaagctttgcc

SEQ ID NO: 14232 - DNA, 25 bp, Homo sapiens
ggagctgagtagtagccagtctgct

SEQ ID NO: 14233 - DNA, 25 bp, Homo sapiens
gtggctgggcaagtgggaaccacta

SEQ ID NO: 14234 - DNA, 25 bp, Homo sapiens
gtttgccttcttacggatttagacg

SEQ ID NO: 14235 - DNA, 25 bp, Homo sapiens
tcacctatcagggcagctctcagga

SEQ ID NO: 14236 - DNA, 25 bp, Homo sapiens
acgtgcgtgaggaggaggcgaccat

SEQ ID NO: 14237 - DNA, 25 bp, Homo sapiens
cagccttttcctgtgaggatgaggt

SEQ ID NO: 14238 - DNA, 25 bp, Homo sapiens
catggctctgtggagatgtgcggga

SEQ ID NO: 14239 - DNA, 25 bp, Homo sapiens
catgggaaagcccggggaacgctct

SEQ ID NO: 14240 - DNA, 25 bp, Homo sapiens
ctgagtgtgcagcagggaggtgtct

SEQ ID NO: 14241 - DNA, 25 bp, Homo sapiens
ggaagtcctgcaccaatgtttgtcc

SEQ ID NO: 14242 - DNA, 25 bp, Homo sapiens
gtgaggtgctggtatgttcctgagg

SEQ ID NO: 14243 - DNA, 25 bp, Homo sapiens
tcagattcaccagtaggcaaagctt

SEQ ID NO: 14244 - DNA, 25 bp, Homo sapiens
tcctctgccagttacgataacgtgc

SEQ ID NO: 14245 - DNA, 25 bp, Homo sapiens
tgcgggagacccttacaggtcggga

SEQ ID NO: 14246 - DNA, 25 bp, Homo sapiens
tgtggttcaggctctagagctggcc

SEQ ID NO: 14247 - DNA, 25 bp, Homo sapiens
aaagagactcttctaaatcctcagc

SEQ ID NO: 14248 - DNA, 25 bp, Homo sapiens
aacaggagatttggttctggcctca

SEQ ID NO: 14249 - DNA, 25 bp, Homo sapiens
ccccttgttctggagcaggccaaga

SEQ ID NO: 14250 - DNA, 25 bp, Homo sapiens
ctccaggagtgcatagactcgcccc

SEQ ID NO: 14251 - DNA, 25 bp, Homo sapiens
gaaagaaccttcacacccaggttag

SEQ ID NO: 14252 - DNA, 25 bp, Homo sapiens
gattattattattcatcctccttcc

SEQ ID NO: 14253 - DNA, 25 bp, Homo sapiens
gccactggactagcttgtatgactt

SEQ ID NO: 14254 - DNA, 25 bp, Homo sapiens
gcctgctgctccaggagtgcataga

SEQ ID NO: 14255 - DNA, 25 bp, Homo sapiens
ggggaggcagggaagcttcaaaaag

SEQ ID NO: 14256 - DNA, 25 bp, Homo sapiens
gtgggaagcatttgacgtcgacttg

SEQ ID NO: 14257 - DNA, 25 bp, Homo sapiens
ttggttctggcctcacatttaaccc

SEQ ID NO: 14258 - DNA, 25 bp, Homo sapiens
acgtccgtgactgtcacctggtaca

SEQ ID NO: 14259 - DNA, 25 bp, Homo sapiens
atatcagggtgcagacacccaaagg

SEQ ID NO: 14260 - DNA, 25 bp, Homo sapiens
atgtgttccccatcatatcagggtg

SEQ ID NO: 14261 - DNA, 25 bp, Homo sapiens
caacgtccgtgactgtcacctggta

SEQ ID NO: 14262 - DNA, 25 bp, Homo sapiens
cccaaaggataacagccctgtggtc

SEQ ID NO: 14263 - DNA, 25 bp, Homo sapiens
ctgtggtcctggcatgcttgataac

SEQ ID NO: 14264 - DNA, 25 bp, Homo sapiens
cttccctgagatacaaagacgggac

SEQ ID NO: 14265 - DNA, 25 bp, Homo sapiens
gtcacctggtacatggggacacaga

SEQ ID NO: 14266 - DNA, 25 bp, Homo sapiens
gtcctggcatgcttgataactgggt

SEQ ID NO: 14267 - DNA, 25 bp, Homo sapiens
gttccccatcatatcagggtgcaga

SEQ ID NO: 14268 - DNA, 25 bp, Homo sapiens
tgataactgggtaccacccaacgtc

SEQ ID NO: 14269 - DNA, 25 bp, Homo sapiens
agagcaggaggtctttctgtctgtc

SEQ ID NO: 14270 - DNA, 25 bp, Homo sapiens
agtttgctagcatttcctgagagaa

SEQ ID NO: 14271 - DNA, 25 bp, Homo sapiens
attgcagaggcattcacgtgccgcc

SEQ ID NO: 14272 - DNA, 25 bp, Homo sapiens
ccacaagacccctagatttcctgga

SEQ ID NO: 14273 - DNA, 25 bp, Homo sapiens
cttctgcttccttctagactaaagc

SEQ ID NO: 14274 - DNA, 25 bp, Homo sapiens
gcacaggaatactgctgggatccct

SEQ ID NO: 14275 - DNA, 25 bp, Homo sapiens
gtagtggtgccagatttctcgattc

SEQ ID NO: 14276 - DNA, 25 bp, Homo sapiens
gtcctccatggtctgccagagaaac

SEQ ID NO: 14277 - DNA, 25 bp, Homo sapiens
tggaccccaatggtggagtcctcca

SEQ ID NO: 14278 - DNA, 25 bp, Homo sapiens
tgtgtgtcgttttgtcgctgttatt

SEQ ID NO: 14279 - DNA, 25 bp, Homo sapiens
ttcctttttcactccagaattcatc

SEQ ID NO: 14280 - DNA, 25 bp, Homo sapiens
atgactgtcaaagatctcacagcaa

SEQ ID NO: 14281 - DNA, 25 bp, Homo sapiens
gaacatttccttctcaataagtcct

SEQ ID NO: 14282 - DNA, 25 bp, Homo sapiens
gaatggccaactctcgaaagttatg

SEQ ID NO: 14283 - DNA, 25 bp, Homo sapiens
gacatgccaacagaaggtaaaccta

SEQ ID NO: 14284 - DNA, 25 bp, Homo sapiens
gatgtggatagcttgatgcgatctg

SEQ ID NO: 14285 - DNA, 25 bp, Homo sapiens
gcagtgggctgtaaactccagcata

SEQ ID NO: 14286 - DNA, 25 bp, Homo sapiens
gtgagccgagtctttaagttcattg

SEQ ID NO: 14287 - DNA, 25 bp, Homo sapiens
tcagggggccaaatgactgtcaaag

SEQ ID NO: 14288 - DNA, 25 bp, Homo sapiens
tccttctcaataagtcctggccaga

SEQ ID NO: 14289 - DNA, 25 bp, Homo sapiens
ttaagttcattgacatgccaacaga

SEQ ID NO: 14290 - DNA, 25 bp, Homo sapiens
ttgatgcgatctgtgagccgagtct

SEQ ID NO: 14291 - DNA, 25 bp, Homo sapiens
aagttatcttttcctgtcaatctgt

SEQ ID NO: 14292 - DNA, 25 bp, Homo sapiens
agaatgaagcaagttcactttcaat

SEQ ID NO: 14293 - DNA, 25 bp, Homo sapiens
atatcaacatcagggctagcacatc

SEQ ID NO: 14294 - DNA, 25 bp, Homo sapiens
ctttctctattatccttctattgga

SEQ ID NO: 14295 - DNA, 25 bp, Homo sapiens
gaaacttcataatactttcagggaa

SEQ ID NO: 14296 - DNA, 25 bp, Homo sapiens
gctagcacatctttctctattatcc

SEQ ID NO: 14297 - DNA, 25 bp, Homo sapiens
gctggagtattttaggagattctgg

SEQ ID NO: 14298 - DNA, 25 bp, Homo sapiens
ggagattctgggtcaagtaatgttt

SEQ ID NO: 14299 - DNA, 25 bp, Homo sapiens
taatgatctttaaacgctatatttc

SEQ ID NO: 14300 - DNA, 25 bp, Homo sapiens
tgggatttagtcagtcacagagata

SEQ ID NO: 14301 - DNA, 25 bp, Homo sapiens
ttagacactccccaaatttctaaat

SEQ ID NO: 14302 - DNA, 25 bp, Homo sapiens
aaacagcttcgtgtctagtatgagc

SEQ ID NO: 14303 - DNA, 25 bp, Homo sapiens
cacatcgatacctgcagcatcttta

SEQ ID NO: 14304 - DNA, 25 bp, Homo sapiens
cacttggtctaagacacggcagcaa

SEQ ID NO: 14305 - DNA, 25 bp, Homo sapiens
cttcgtgtctagtatgagctcagta

SEQ ID NO: 14306 - DNA, 25 bp, Homo sapiens
gaaactatatgtatctcgtggatct

SEQ ID NO: 14307 - DNA, 25 bp, Homo sapiens
gacacctgggaaatactcacttaca

SEQ ID NO: 14308 - DNA, 25 bp, Homo sapiens
gacacggcagcaagacatccctgca

SEQ ID NO: 14309 - DNA, 25 bp, Homo sapiens
gcagcatctttagtcaagttggagg

SEQ ID NO: 14310 - DNA, 25 bp, Homo sapiens
tatctcgtggatctgccagtaccag

SEQ ID NO: 14311 - DNA, 25 bp, Homo sapiens
tctttcagagttagagacacctggg

SEQ ID NO: 14312 - DNA, 25 bp, Homo sapiens
tgggaaatactcacttacaccacca

SEQ ID NO: 14313 - DNA, 25 bp, Homo sapiens
ggccatttcagttctcatgtgtgta

SEQ ID NO: 14314 - DNA, 25 bp, Homo sapiens
ggctttctttctgggtttgggccat

SEQ ID NO: 14315 - DNA, 25 bp, Homo sapiens
tccctctcttagtgttctttaatca

SEQ ID NO: 14316 - DNA, 25 bp, Homo sapiens
actccccgatcaacaaacttctgta

SEQ ID NO: 14317 - DNA, 25 bp, Homo sapiens
aggagaggccaccttcttaggtgcc

SEQ ID NO: 14318 - DNA, 25 bp, Homo sapiens
cccgcagtttgtgttcgacgtgcaa

SEQ ID NO: 14319 - DNA, 25 bp, Homo sapiens
gaagatgcagctgggctatcggctc

SEQ ID NO: 14320 - DNA, 25 bp, Homo sapiens
gaggatggcacggcccagaagatgc

SEQ ID NO: 14321 - DNA, 25 bp, Homo sapiens
gctatcggctccagcagattgcagc

SEQ ID NO: 14322 - DNA, 25 bp, Homo sapiens
ggccctgcatgaactctacaagtac

SEQ ID NO: 14323 - DNA, 25 bp, Homo sapiens
gtatgcacgggacattccccggtac

SEQ ID NO: 14324 - DNA, 25 bp, Homo sapiens
gtcattgcacagaccttcatggacg

SEQ ID NO: 14325 - DNA, 25 bp, Homo sapiens
taacatggatgcggtgctccttgtc

SEQ ID NO: 14326 - DNA, 25 bp, Homo sapiens
tcccagccagcgaccaagagatgaa

SEQ ID NO: 14327 - DNA, 25 bp, Homo sapiens
cagcatctggctgtctagaatgtgg

SEQ ID NO: 14328 - DNA, 25 bp, Homo sapiens
gaatgctgaactccttgttagccct

SEQ ID NO: 14329 - DNA, 25 bp, Homo sapiens
gagacggagatcctaaggtccaaca

SEQ ID NO: 14330 - DNA, 25 bp, Homo sapiens
gtgcttgtcattccagagtgctgag

SEQ ID NO: 14331 - DNA, 25 bp, Homo sapiens
taagtctcacccattatctggaata

SEQ ID NO: 14332 - DNA, 25 bp, Homo sapiens
tccttgttagcccttcagattgtta

SEQ ID NO: 14333 - DNA, 25 bp, Homo sapiens
tggttctcatttggtctgccagaat

SEQ ID NO: 14334 - DNA, 25 bp, Homo sapiens
ttgtgttccctggctgatgatccag

SEQ ID NO: 14335 - DNA, 25 bp, Homo sapiens
aagccaacaaggccacactggtgtg

SEQ ID NO: 14336 - DNA, 25 bp, Homo sapiens
aagctacagctgccaggtcatgcat

SEQ ID NO: 14337 - DNA, 25 bp, Homo sapiens
attcagtgaagcatgtgtttggcag

SEQ ID NO: 14338 - DNA, 25 bp, Homo sapiens
caagtacatggccagcagctacctg

SEQ ID NO: 14339 - DNA, 25 bp, Homo sapiens
ccacaggggcctggagctgcaggat

SEQ ID NO: 14340 - DNA, 25 bp, Homo sapiens
gagcactgcagagaagacggtggcc

SEQ ID NO: 14341 - DNA, 25 bp, Homo sapiens
gcaacatgcaggttcctgctccagc

SEQ ID NO: 14342 - DNA, 25 bp, Homo sapiens
gctgcaggatcccaggggaggcgtc

SEQ ID NO: 14343 - DNA, 25 bp, Homo sapiens
gggggtttcaatccaagcataattc

SEQ ID NO: 14344 - DNA, 25 bp, Homo sapiens
ggtcatgcatgaagggagcactgca

SEQ ID NO: 14345 - DNA, 25 bp, Homo sapiens
gtggcccctgcagaatgttcatagg

SEQ ID NO: 14346 - DNA, 25 bp, Homo sapiens
agaagtgcagccagagtgaatcatc

SEQ ID NO: 14347 - DNA, 25 bp, Homo sapiens
atggctagcttttctcattatccca

SEQ ID NO: 14348 - DNA, 25 bp, Homo sapiens
ctgcactgtgcatttcaagcaacaa

SEQ ID NO: 14349 - DNA, 25 bp, Homo sapiens
gacaagcactgtactcaaaggattt

SEQ ID NO: 14350 - DNA, 25 bp, Homo sapiens
gatactgtgtgatgtggcaggcagc

SEQ ID NO: 14351 - DNA, 25 bp, Homo sapiens
ggaaggaggcaaactggtccaccgt

SEQ ID NO: 14352 - DNA, 25 bp, Homo sapiens
ggagctcgaagattgctgcactgtg

SEQ ID NO: 14353 - DNA, 25 bp, Homo sapiens
ggccccaagtagttcaatggctagc

SEQ ID NO: 14354 - DNA, 25 bp, Homo sapiens
gtccaccgtcctcagaatgtgagtt

SEQ ID NO: 14355 - DNA, 25 bp, Homo sapiens
gttccaaggctccaatgctcaggac

SEQ ID NO: 14356 - DNA, 25 bp, Homo sapiens
tggatatatatttactctctgaaca

SEQ ID NO: 14357 - DNA, 25 bp, Homo sapiens
acattttcccttccctgaagatcta

SEQ ID NO: 14358 - DNA, 25 bp, Homo sapiens
gaacattcgaccttcattacggaga

SEQ ID NO: 14359 - DNA, 25 bp, Homo sapiens
gagcagatggcctggctgctgctca

SEQ ID NO: 14360 - DNA, 25 bp, Homo sapiens
ggagctgtttttattcctgacctcc

SEQ ID NO: 14361 - DNA, 25 bp, Homo sapiens
aaaaggtgcgtctggtggtggttct

SEQ ID NO: 14362 - DNA, 25 bp, Homo sapiens
atacctcttcgtacattaagtgcaa

SEQ ID NO: 14363 - DNA, 25 bp, Homo sapiens
atgggtacttttgcagtgtctttgg

SEQ ID NO: 14364 - DNA, 25 bp, Homo sapiens
cagtgtctttggtggaggtgcatcc

SEQ ID NO: 14365 - DNA, 25 bp, Homo sapiens
catccattagctgccgttacactgt

SEQ ID NO: 14366 - DNA, 25 bp, Homo sapiens
gagatctttctaacttttttatgtg

SEQ ID NO: 14367 - DNA, 25 bp, Homo sapiens
gctgccgttacactgttacttttaa

SEQ ID NO: 14368 - DNA, 25 bp, Homo sapiens
ggtggttctctgatatttctgtttt

SEQ ID NO: 14369 - DNA, 25 bp, Homo sapiens
taaaacctagttggcttcagctatt

SEQ ID NO: 14370 - DNA, 25 bp, Homo sapiens
ttctgttttatatacctcttcgtac

SEQ ID NO: 14371 - DNA, 25 bp, Homo sapiens
ttgggtttctttcactctagagtta

SEQ ID NO: 14372 - DNA, 25 bp, Homo sapiens
aagccagctgactgttccagcaggg

SEQ ID NO: 14373 - DNA, 25 bp, Homo sapiens
agaggcaagattaagccacacatgc

SEQ ID NO: 14374 - DNA, 25 bp, Homo sapiens
caggggcttccttgtgtaattattt

SEQ ID NO: 14375 - DNA, 25 bp, Homo sapiens
ccacctatagcaccacaggctacag

SEQ ID NO: 14376 - DNA, 25 bp, Homo sapiens
cctgtcacaggctaccaatatgggc

SEQ ID NO: 14377 - DNA, 25 bp, Homo sapiens
gaccaaccacggtggggtacctcat

SEQ ID NO: 14378 - DNA, 25 bp, Homo sapiens
gagactagaccatatgaagagcttg

SEQ ID NO: 14379 - DNA, 25 bp, Homo sapiens
gccacacatgccggtatcaattttt

SEQ ID NO: 14380 - DNA, 25 bp, Homo sapiens
ggacagtctgccaacatctcagtcc

SEQ ID NO: 14381 - DNA, 25 bp, Homo sapiens
ggcctctcacctcaggtaatgggac

SEQ ID NO: 14382 - DNA, 25 bp, Homo sapiens
ggctacagtatggaccctgtcacag

SEQ ID NO: 14383 - DNA, 25 bp, Homo sapiens
atatacctgatctgttcatgcacta

SEQ ID NO: 14384 - DNA, 25 bp, Homo sapiens
atcggctgtatgttaggttttcttt

SEQ ID NO: 14385 - DNA, 25 bp, Homo sapiens
atcgtgccaaacttagtctggttac

SEQ ID NO: 14386 - DNA, 25 bp, Homo sapiens
gctggggtcatttccaaagcagtcc

SEQ ID NO: 14387 - DNA, 25 bp, Homo sapiens
gggaatactttctgattccctctgc

SEQ ID NO: 14388 - DNA, 25 bp, Homo sapiens
gggagagtccaagataccactgata

SEQ ID NO: 14389 - DNA, 25 bp, Homo sapiens
gtattgcaacaacttctgaaactct

SEQ ID NO: 14390 - DNA, 25 bp, Homo sapiens
gtggactatatgtttctcacagttt

SEQ ID NO: 14391 - DNA, 25 bp, Homo sapiens
gttcatgcactaaaggctctggagc

SEQ ID NO: 14392 - DNA, 25 bp, Homo sapiens
ttctttaatcctcacatcgtgccaa

SEQ ID NO: 14393 - DNA, 25 bp, Homo sapiens
ttggccttcacctggtatcacagaa

SEQ ID NO: 14394 - DNA, 25 bp, Homo sapiens
ctggagtctggggtgtgttgtcata

SEQ ID NO: 14395 - DNA, 25 bp, Homo sapiens
gaaccgtgacatcagcgtagtgttt

SEQ ID NO: 14396 - DNA, 25 bp, Homo sapiens
gaagctgcatgttaagtgccattac

SEQ ID NO: 14397 - DNA, 25 bp, Homo sapiens
gtctgatgtggcaaaaggccctctg

SEQ ID NO: 14398 - DNA, 25 bp, Homo sapiens
gttgttgttggcaagctgcaggttt

SEQ ID NO: 14399 - DNA, 25 bp, Homo sapiens
aaaaactggtccaggcgcagtggct

SEQ ID NO: 14400 - DNA, 25 bp, Homo sapiens
aatactagagattaggccaggcaca

SEQ ID NO: 14401 - DNA, 25 bp, Homo sapiens
ccaacactcggggaggttgaggcta

SEQ ID NO: 14402 - DNA, 25 bp, Homo sapiens
ctagagattaggccaggcacagtga

SEQ ID NO: 14403 - DNA, 25 bp, Homo sapiens
gatcccaacactcggggaggttgag

SEQ ID NO: 14404 - DNA, 25 bp, Homo sapiens
gtgatcccaacactcggggaggttg

SEQ ID NO: 14405 - DNA, 25 bp, Homo sapiens
taaaaactggtccaggcgcagtggc

SEQ ID NO: 14406 - DNA, 25 bp, Homo sapiens
tactagagattaggccaggcacagt

SEQ ID NO: 14407 - DNA, 25 bp, Homo sapiens
tcccaacactcggggaggttgaggc

SEQ ID NO: 14408 - DNA, 25 bp, Homo sapiens
tgatcccaacactcggggaggttga

SEQ ID NO: 14409 - DNA, 25 bp, Homo sapiens
tgtgatcccaacactcggggaggtt

SEQ ID NO: 14410 - DNA, 25 bp, Homo sapiens
ccagcatcgcatgcagcgcaaggtt

SEQ ID NO: 14411 - DNA, 25 bp, Homo sapiens
cggcgagatccagcatcgcatgcag

SEQ ID NO: 14412 - DNA, 25 bp, Homo sapiens
ctgcctgccattgacaatgttgctg

SEQ ID NO: 14413 - DNA, 25 bp, Homo sapiens
ctgggaagtgtgcttttggcatccg

SEQ ID NO: 14414 - DNA, 25 bp, Homo sapiens
gaaggagctgtagtgtcctgctgcc

SEQ ID NO: 14415 - DNA, 25 bp, Homo sapiens
gaggaaggagctgtagtgtcctgct

SEQ ID NO: 14416 - DNA, 25 bp, Homo sapiens
gcatcgcatgcagcgcaaggttctc

SEQ ID NO: 14417 - DNA, 25 bp, Homo sapiens
gcgagatccagcatcgcatgcagcg

SEQ ID NO: 14418 - DNA, 25 bp, Homo sapiens
gttctgggaagtgtgcttttggcat

SEQ ID NO: 14419 - DNA, 25 bp, Homo sapiens
tcgcatgcagcgcaaggttctctac

SEQ ID NO: 14420 - DNA, 25 bp, Homo sapiens
ttgacaatgttgctgggacctctgc

SEQ ID NO: 14421 - DNA, 25 bp, Homo sapiens
aatggaatattgtcgcaccccatgc

SEQ ID NO: 14422 - DNA, 25 bp, Homo sapiens
ctcttcttcctttcagtacatgtat

SEQ ID NO: 14423 - DNA, 25 bp, Homo sapiens
ctgggggtgttgtgtcctacaggat

SEQ ID NO: 14424 - DNA, 25 bp, Homo sapiens
gatgtctcagctcaaatggaatatt

SEQ ID NO: 14425 - DNA, 25 bp, Homo sapiens
ggaaaggccaatcagaaatagtgtt

SEQ ID NO: 14426 - DNA, 25 bp, Homo sapiens
ggtcatcgaccccttgacaagaaga

SEQ ID NO: 14427 - DNA, 25 bp, Homo sapiens
gtagtcaatgagtactcctcagaac

SEQ ID NO: 14428 - DNA, 25 bp, Homo sapiens
gtatttgctgaaagacctgtggcaa

SEQ ID NO: 14429 - DNA, 25 bp, Homo sapiens
gtcagttgcaagaggctttgctaca

SEQ ID NO: 14430 - DNA, 25 bp, Homo sapiens
gtgtcctacaggatgtcagttgcaa

SEQ ID NO: 14431 - DNA, 25 bp, Homo sapiens
gttagaatctgatgtctcagctcaa

SEQ ID NO: 14432 - DNA, 25 bp, Homo sapiens
agaccttctatctgaggaacaacca

SEQ ID NO: 14433 - DNA, 25 bp, Homo sapiens
agatgtggtacccattgagcctcat

SEQ ID NO: 14434 - DNA, 25 bp, Homo sapiens
atgagaccagactccagctggaggc

SEQ ID NO: 14435 - DNA, 25 bp, Homo sapiens
cattgagcctcatgctctgttcttg

SEQ ID NO: 14436 - DNA, 25 bp, Homo sapiens
cctgtcctgtgtcaagtctggtgat

SEQ ID NO: 14437 - DNA, 25 bp, Homo sapiens
gatgcaagccttcagaatctgggat

SEQ ID NO: 14438 - DNA, 25 bp, Homo sapiens
gggatgttaaccagaagaccttcta

SEQ ID NO: 14439 - DNA, 25 bp, Homo sapiens
taacatcactgacctgagcgagaac

SEQ ID NO: 14440 - DNA, 25 bp, Homo sapiens
tgccgaccctctgggagaaaatcca

SEQ ID NO: 14441 - DNA, 25 bp, Homo sapiens
tggagggaagatgtgcctgtcctgt

SEQ ID NO: 14442 - DNA, 25 bp, Homo sapiens
tggttcctctgcacagcgatggaag

SEQ ID NO: 14443 - DNA, 25 bp, Homo sapiens
aacaacgacctaagcatgtttgtgc

SEQ ID NO: 14444 - DNA, 25 bp, Homo sapiens
aggccaaaattctagggattccata

SEQ ID NO: 14445 - DNA, 25 bp, Homo sapiens
ccatataaaaacaacgacctaagca

SEQ ID NO: 14446 - DNA, 25 bp, Homo sapiens
cttctgcccaacgacatcgatggcc

SEQ ID NO: 14447 - DNA, 25 bp, Homo sapiens
gacctaagcatgtttgtgcttctgc

SEQ ID NO: 14448 - DNA, 25 bp, Homo sapiens
gagcacaagtaaatctgtacagatg

SEQ ID NO: 14449 - DNA, 25 bp, Homo sapiens
gcaggccaaaattctagggattcca

SEQ ID NO: 14450 - DNA, 25 bp, Homo sapiens
gccaaaattctagggattccatata

SEQ ID NO: 14451 - DNA, 25 bp, Homo sapiens
gcttcactttcctggaggacttgca

SEQ ID NO: 14452 - DNA, 25 bp, Homo sapiens
taagcatgtttgtgcttctgcccaa

SEQ ID NO: 14453 - DNA, 25 bp, Homo sapiens
tcactttcctggaggacttgcaggc

SEQ ID NO: 14454 - DNA, 25 bp, Homo sapiens
aggatgtcattccatctcattctct

SEQ ID NO: 14455 - DNA, 25 bp, Homo sapiens
agtggcaggatgtcattccatctca

SEQ ID NO: 14456 - DNA, 25 bp, Homo sapiens
atgggacacagtaagagacggggct

SEQ ID NO: 14457 - DNA, 25 bp, Homo sapiens
cccagtaggtagaggttgtagtgag

SEQ ID NO: 14458 - DNA, 25 bp, Homo sapiens
cctctgttctggaaactgggagaga

SEQ ID NO: 14459 - DNA, 25 bp, Homo sapiens
ctcttctttctcctcaaataaatgg

SEQ ID NO: 14460 - DNA, 25 bp, Homo sapiens
gcagcagatgctttgggtggtcatg

SEQ ID NO: 14461 - DNA, 25 bp, Homo sapiens
ggtctgagactcttaagtggaagca

SEQ ID NO: 14462 - DNA, 25 bp, Homo sapiens
taaagtcattggtctgagactctta

SEQ ID NO: 14463 - DNA, 25 bp, Homo sapiens
tgggtggtcatgttcagccagtacc

SEQ ID NO: 14464 - DNA, 25 bp, Homo sapiens
tggtcatgttcagccagtaccatcg

SEQ ID NO: 14465 - DNA, 25 bp, Homo sapiens
aaccacacatttgtaccgaattggc

SEQ ID NO: 14466 - DNA, 25 bp, Homo sapiens
ataccctcctcaaataacttgctta

SEQ ID NO: 14467 - DNA, 25 bp, Homo sapiens
atgtcagactgtaaaaccttgtgtg

SEQ ID NO: 14468 - DNA, 25 bp, Homo sapiens
ggctgtatgaaaataccctcctcaa

SEQ ID NO: 14469 - DNA, 25 bp, Homo sapiens
gtggagtttcgtaatttcccagact

SEQ ID NO: 14470 - DNA, 25 bp, Homo sapiens
gttctggtattaccaaaccacacat

SEQ ID NO: 14471 - DNA, 25 bp, Homo sapiens
taaatttgctgttctggtattacca

SEQ ID NO: 14472 - DNA, 25 bp, Homo sapiens
tacctacgcagtgaaatgtcagact

SEQ ID NO: 14473 - DNA, 25 bp, Homo sapiens
tagccatttacagcaatgccaaata

SEQ ID NO: 14474 - DNA, 25 bp, Homo sapiens
tgtctttttacctacgcagtgaaat

SEQ ID NO: 14475 - DNA, 25 bp, Homo sapiens
ttgtagttttttattcatgctgaat

SEQ ID NO: 14476 - DNA, 25 bp, Homo sapiens
agatttggaaggggctctggctccc

SEQ ID NO: 14477 - DNA, 25 bp, Homo sapiens
aggactgagattgcctctgacttcc

SEQ ID NO: 14478 - DNA, 25 bp, Homo sapiens
cctccccttgcttccagggaagatg

SEQ ID NO: 14479 - DNA, 25 bp, Homo sapiens
ctgttctcacttttggctttatgtc

SEQ ID NO: 14480 - DNA, 25 bp, Homo sapiens
cttccctcgaacccagagatttttg

SEQ ID NO: 14481 - DNA, 25 bp, Homo sapiens
gatagctatctgggacattattggc

SEQ ID NO: 14482 - DNA, 25 bp, Homo sapiens
gtctggagaccacatttggttctcg

SEQ ID NO: 14483 - DNA, 25 bp, Homo sapiens
taagagtggcttgggatgctgtgtc

SEQ ID NO: 14484 - DNA, 25 bp, Homo sapiens
tcccaaggaatttcttttcacctct

SEQ ID NO: 14485 - DNA, 25 bp, Homo sapiens
tccctaacacctgaatcccagatga

SEQ ID NO: 14486 - DNA, 25 bp, Homo sapiens
tttggttctcgaaccatctacctgc

SEQ ID NO: 14487 - DNA, 25 bp, Homo sapiens
agatttggcaggatcggcttcctca

SEQ ID NO: 14488 - DNA, 25 bp, Homo sapiens
aggttgtgtcactgactcaggctgc

SEQ ID NO: 14489 - DNA, 25 bp, Homo sapiens
ctcccattcaccctgtgtaacagga

SEQ ID NO: 14490 - DNA, 25 bp, Homo sapiens
gaagggatcctaatcccttcctctc

SEQ ID NO: 14491 - DNA, 25 bp, Homo sapiens
gatgaagagggtagagtgggctgct

SEQ ID NO: 14492 - DNA, 25 bp, Homo sapiens
gctgccatcagtctagtggtttcgt

SEQ ID NO: 14493 - DNA, 25 bp, Homo sapiens
ggaagtgccttaacctagagggtcg

SEQ ID NO: 14494 - DNA, 25 bp, Homo sapiens
ggctgctggtgtcgcatcaagattt

SEQ ID NO: 14495 - DNA, 25 bp, Homo sapiens
gggacagggccatggggtagggtga

SEQ ID NO: 14496 - DNA, 25 bp, Homo sapiens
tcatctgaccttagtttgctgccat

SEQ ID NO: 14497 - DNA, 25 bp, Homo sapiens
tccccttagagtgctgtgagatgag

SEQ ID NO: 14498 - DNA, 25 bp, Homo sapiens
acagcttcaaagtctcctaccagct

SEQ ID NO: 14499 - DNA, 25 bp, Homo sapiens
ccactgctgcagcgcgagctgatgg

SEQ ID NO: 14500 - DNA, 25 bp, Homo sapiens
ctcctaccagctggcggacggaggg

SEQ ID NO: 14501 - DNA, 25 bp, Homo sapiens
ctgacactgtatgggctgcgaggac

SEQ ID NO: 14502 - DNA, 25 bp, Homo sapiens
gaccaccagttcactgaggctcaac

SEQ ID NO: 14503 - DNA, 25 bp, Homo sapiens
gcggacggaggggagcctcagagtg

SEQ ID NO: 14504 - DNA, 25 bp, Homo sapiens
tcactgaggctcaactgggaggccc

SEQ ID NO: 14505 - DNA, 25 bp, Homo sapiens
tcagccaaggtcaactggatgcccc

SEQ ID NO: 14506 - DNA, 25 bp, Homo sapiens
tcccacacagttgcgtgcactgaac

SEQ ID NO: 14507 - DNA, 25 bp, Homo sapiens
tgactgacgtgaccaccagttcact

SEQ ID NO: 14508 - DNA, 25 bp, Homo sapiens
ttccatcaccaagcactctggagcc

SEQ ID NO: 14509 - DNA, 25 bp, Homo sapiens
catggtcacacactgatgcttagat

SEQ ID NO: 14510 - DNA, 25 bp, Homo sapiens
gaagtcttttgttcgcatggtcaca

SEQ ID NO: 14511 - DNA, 25 bp, Homo sapiens
agcatctcctgcactgggagcagct

SEQ ID NO: 14512 - DNA, 25 bp, Homo sapiens
agctccaacatcggggcaggttatg

SEQ ID NO: 14513 - DNA, 25 bp, Homo sapiens
ccatcactgggctccaggctgaggt

SEQ ID NO: 14514 - DNA, 25 bp, Homo sapiens
cccagggcagagggtcagcatctcc

SEQ ID NO: 14515 - DNA, 25 bp, Homo sapiens
ccccaaactcctcatctatggtaac

SEQ ID NO: 14516 - DNA, 25 bp, Homo sapiens
ctgattattacagccagtcctatga

SEQ ID NO: 14517 - DNA, 25 bp, Homo sapiens
ggctccaggctgaggtagaggctga

SEQ ID NO: 14518 - DNA, 25 bp, Homo sapiens
ggtatctgcaacttccaggaacagc

SEQ ID NO: 14519 - DNA, 25 bp, Homo sapiens
taacaacaatcgggcctcaggggtc

SEQ ID NO: 14520 - DNA, 25 bp, Homo sapiens
tatggtaacaacaatcgggcctcag

SEQ ID NO: 14521 - DNA, 25 bp, Homo sapiens
tgatgtacactggtatctgcaactt

SEQ ID NO: 14522 - DNA, 25 bp, Homo sapiens
accatctcctgcactgggagcagct

SEQ ID NO: 14523 - DNA, 25 bp, Homo sapiens
agtaccttggtatgatgtacactgg

SEQ ID NO: 14524 - DNA, 25 bp, Homo sapiens
cagctccgacatcggggcaggttat

SEQ ID NO: 14525 - DNA, 25 bp, Homo sapiens
ccatcactgggcttcaggctgagga

SEQ ID NO: 14526 - DNA, 25 bp, Homo sapiens
cccaaactcctcatctatgctaata

SEQ ID NO: 14527 - DNA, 25 bp, Homo sapiens
gcactgggagcagctccgacatcgg

SEQ ID NO: 14528 - DNA, 25 bp, Homo sapiens
gccagtcttatgacagcagcgtgag

SEQ ID NO: 14529 - DNA, 25 bp, Homo sapiens
gctgattaatactgccagtcttatg

SEQ ID NO: 14530 - DNA, 25 bp, Homo sapiens
ggggcaggttatgaagtaccttggt

SEQ ID NO: 14531 - DNA, 25 bp, Homo sapiens
tacactggtaccagcagcttccagg

SEQ ID NO: 14532 - DNA, 25 bp, Homo sapiens
tctatgctaatagcaaccggccctc

SEQ ID NO: 14533 - DNA, 25 bp, Homo sapiens
acaggcctggagtctacaccaaggt

SEQ ID NO: 14534 - DNA, 25 bp, Homo sapiens
caaggtctacaactatgtggactgg

SEQ ID NO: 14535 - DNA, 25 bp, Homo sapiens
gcatccaggtgagactgggagagca

SEQ ID NO: 14536 - DNA, 25 bp, Homo sapiens
ggactctggacaatgacatcctgct

SEQ ID NO: 14537 - DNA, 25 bp, Homo sapiens
ggagtctacaccaaggtctacaact

SEQ ID NO: 14538 - DNA, 25 bp, Homo sapiens
gggaggcaaggattcctgccagggt

SEQ ID NO: 14539 - DNA, 25 bp, Homo sapiens
gtggtgtcagcagctcactgctaca

SEQ ID NO: 14540 - DNA, 25 bp, Homo sapiens
gtgtcagcagctcactgctacaagt

SEQ ID NO: 14541 - DNA, 25 bp, Homo sapiens
gtgtgggtttccttgagggaggcaa

SEQ ID NO: 14542 - DNA, 25 bp, Homo sapiens
tcctgccagggtgactctggtggcc

SEQ ID NO: 14543 - DNA, 25 bp, Homo sapiens
ccgccatttcctctgaagcaggtga

SEQ ID NO: 14544 - DNA, 25 bp, Homo sapiens
ccccctaattatccgatctctgatg

SEQ ID NO: 14545 - DNA, 25 bp, Homo sapiens
cttggaggacccagtcctttgtgcc

SEQ ID NO: 14546 - DNA, 25 bp, Homo sapiens
ggccctgcgttgtggatggtgacac

SEQ ID NO: 14547 - DNA, 25 bp, Homo sapiens
tctgggatccctccgagaagaacca

SEQ ID NO: 14548 - DNA, 25 bp, Homo sapiens
aaaaatgcttttatcttgctataga

SEQ ID NO: 14549 - DNA, 25 bp, Homo sapiens
aaaccattcattgctacgttgctta

SEQ ID NO: 14550 - DNA, 25 bp, Homo sapiens
aaaggcacaccacatctgaataatc

SEQ ID NO: 14551 - DNA, 25 bp, Homo sapiens
atatctatgaccactgttagcccat

SEQ ID NO: 14552 - DNA, 25 bp, Homo sapiens
gaatactatattccgtgttttgagt

SEQ ID NO: 14553 - DNA, 25 bp, Homo sapiens
gaggctttaacgtaaacactggtga

SEQ ID NO: 14554 - DNA, 25 bp, Homo sapiens
gtaagttttcatatcatgtgctgta

SEQ ID NO: 14555 - DNA, 25 bp, Homo sapiens
gttgcttattgtgtttttatgctgt

SEQ ID NO: 14556 - DNA, 25 bp, Homo sapiens
tattccgtgttttgagtgacaagtt

SEQ ID NO: 14557 - DNA, 25 bp, Homo sapiens
tcatgtgctgtaaagttttcctaaa

SEQ ID NO: 14558 - DNA, 25 bp, Homo sapiens
tgttagcccattatattcattccaa

SEQ ID NO: 14559 - DNA, 25 bp, Homo sapiens
atattaatttccctgacttctgtgc

SEQ ID NO: 14560 - DNA, 25 bp, Homo sapiens
cagatgctgtggtgcacgaggtcca

SEQ ID NO: 14561 - DNA, 25 bp, Homo sapiens
ctggggcgattatccatctttgcta

SEQ ID NO: 14562 - DNA, 25 bp, Homo sapiens
gattatccatctttgctacattaca

SEQ ID NO: 14563 - DNA, 25 bp, Homo sapiens
tgcaagacaggagccacatgcccta

SEQ ID NO: 14564 - DNA, 25 bp, Homo sapiens
aaaacatctttcacaacttaccttg

SEQ ID NO: 14565 - DNA, 25 bp, Homo sapiens
aaagatcttttcacaacttaccttg

SEQ ID NO: 14566 - DNA, 25 bp, Homo sapiens
aaatggaggatctccttttcctgtg

SEQ ID NO: 14567 - DNA, 25 bp, Homo sapiens
aataaagtgtcatccaagccataaa

SEQ ID NO: 14568 - DNA, 25 bp, Homo sapiens
gagttactggatgcagcacccgaac

SEQ ID NO: 14569 - DNA, 25 bp, Homo sapiens
gatctccttttcctgtgacaaaaca

SEQ ID NO: 14570 - DNA, 25 bp, Homo sapiens
ggaacaacttctagtattggatctg

SEQ ID NO: 14571 - DNA, 25 bp, Homo sapiens
gggggaaggatagccatttggagat

SEQ ID NO: 14572 - DNA, 25 bp, Homo sapiens
attactctctactcctaaagttatt

SEQ ID NO: 14573 - DNA, 25 bp, Homo sapiens
caatcatctccttaacaggggtcgt

SEQ ID NO: 14574 - DNA, 25 bp, Homo sapiens
ccaggtaattgtctctttttctaat

SEQ ID NO: 14575 - DNA, 25 bp, Homo sapiens
ctggcctcagatacacctaagaagc

SEQ ID NO: 14576 - DNA, 25 bp, Homo sapiens
ggcagcttgaaatgttggtcctaat

SEQ ID NO: 14577 - DNA, 25 bp, Homo sapiens
ggtcgtaagcctggtttgcttctat

SEQ ID NO: 14578 - DNA, 25 bp, Homo sapiens
ggttcattctcctgctttaaaaagt

SEQ ID NO: 14579 - DNA, 25 bp, Homo sapiens
taacttctgctaggtattactctct

SEQ ID NO: 14580 - DNA, 25 bp, Homo sapiens
taattaaccatctacctctgttttt

SEQ ID NO: 14581 - DNA, 25 bp, Homo sapiens
taggggcaaggttcattctcctgct

SEQ ID NO: 14582 - DNA, 25 bp, Homo sapiens
tttttcctcttctatagacttgaga

SEQ ID NO: 14583 - DNA, 25 bp, Homo sapiens
aattaaactaatttgtgcatgtaca

SEQ ID NO: 14584 - DNA, 25 bp, Homo sapiens
agatgacctcaagcagtttggccta

SEQ ID NO: 14585 - DNA, 25 bp, Homo sapiens
aggccctggaactgaggggcgttca

SEQ ID NO: 14586 - DNA, 25 bp, Homo sapiens
aggggcgttcaacctgtatcatgcc

SEQ ID NO: 14587 - DNA, 25 bp, Homo sapiens
caagcagtttggcctaacaaccagt

SEQ ID NO: 14588 - DNA, 25 bp, Homo sapiens
caagccactggaggttaattttgcc

SEQ ID NO: 14589 - DNA, 25 bp, Homo sapiens
gagtctgtcaaaacaagtatatcaa

SEQ ID NO: 14590 - DNA, 25 bp, Homo sapiens
gtatcatgcccagccaactaataaa

SEQ ID NO: 14591 - DNA, 25 bp, Homo sapiens
gttgcatcagatccctgaagctcac

SEQ ID NO: 14592 - DNA, 25 bp, Homo sapiens
taacaaccagtattccgttccgagg

SEQ ID NO: 14593 - DNA, 25 bp, Homo sapiens
tattccgttccgaggttgcatcaga

SEQ ID NO: 14594 - DNA, 25 bp, Homo sapiens
attggccatcccatcactaacaaaa

SEQ ID NO: 14595 - DNA, 25 bp, Homo sapiens
gaagaggctctccaagtaggtatta

SEQ ID NO: 14596 - DNA, 25 bp, Homo sapiens
gatgtcctcattgccacaaaactca

SEQ ID NO: 14597 - DNA, 25 bp, Homo sapiens
ggagggttgatagagccacaggttc

SEQ ID NO: 14598 - DNA, 25 bp, Homo sapiens
ggatctctgtactaaaagcctcccg

SEQ ID NO: 14599 - DNA, 25 bp, Homo sapiens
gggcataattgatcctcttactggc

SEQ ID NO: 14600 - DNA, 25 bp, Homo sapiens
ggttcactctcggttatcaatagaa

SEQ ID NO: 14601 - DNA, 25 bp, Homo sapiens
gttgatgaggggtttgcccagcagc

SEQ ID NO: 14602 - DNA, 25 bp, Homo sapiens
taccgggtggccgaagctttgcata

SEQ ID NO: 14603 - DNA, 25 bp, Homo sapiens
tagaagtatctgagcccctgatgac

SEQ ID NO: 14604 - DNA, 25 bp, Homo sapiens
ttggttgatcggattactgccctcc

SEQ ID NO: 14605 - DNA, 25 bp, Homo sapiens
ataactgcctggaagcctttcattt

SEQ ID NO: 14606 - DNA, 25 bp, Homo sapiens
cactactgctgcagctcacaaacac

SEQ ID NO: 14607 - DNA, 25 bp, Homo sapiens
ggttttcaaaccagtgggcacacag

SEQ ID NO: 14608 - DNA, 25 bp, Homo sapiens
gtgtggtctattttgccatcatcac

SEQ ID NO: 14609 - DNA, 25 bp, Homo sapiens
tctgcatattacatgtacctcctcc

SEQ ID NO: 14610 - DNA, 25 bp, Homo sapiens
ttatgtggtgtgtttttccgtaata

SEQ ID NO: 14611 - DNA, 25 bp, Homo sapiens
agacacagatatgcacttataccca

SEQ ID NO: 14612 - DNA, 25 bp, Homo sapiens
agacactgtgtcaggtagcctcact

SEQ ID NO: 14613 - DNA, 25 bp, Homo sapiens
catgtaccaagcaatgtgcctttaa

SEQ ID NO: 14614 - DNA, 25 bp, Homo sapiens
gaatgtaactttccatgtaccaagc

SEQ ID NO: 14615 - DNA, 25 bp, Homo sapiens
gataccatgaagttctttctttatg

SEQ ID NO: 14616 - DNA, 25 bp, Homo sapiens
gcacttatacccataccattagcag

SEQ ID NO: 14617 - DNA, 25 bp, Homo sapiens
gcctcactatctacaacttaacatc

SEQ ID NO: 14618 - DNA, 25 bp, Homo sapiens
ggaatcgccaaatattactgatacc

SEQ ID NO: 14619 - DNA, 25 bp, Homo sapiens
gtgcctttaaaagaggtcctatgga

SEQ ID NO: 14620 - DNA, 25 bp, Homo sapiens
gtgtcaggtagcctcactatctaca

SEQ ID NO: 14621 - DNA, 25 bp, Homo sapiens
tatggtgttgtgtatgggaatgtaa

SEQ ID NO: 14622 - DNA, 25 bp, Homo sapiens
atgaattagtccgccatcacaacat

SEQ ID NO: 14623 - DNA, 25 bp, Homo sapiens
attttaagctgtcccacttacagat

SEQ ID NO: 14624 - DNA, 25 bp, Homo sapiens
ccccgactcttgtacggtcggcatc

SEQ ID NO: 14625 - DNA, 25 bp, Homo sapiens
gaaaccataccagtgtgacttcaag

SEQ ID NO: 14626 - DNA, 25 bp, Homo sapiens
gtcagaaaaagtttgcccggtcaga

SEQ ID NO: 14627 - DNA, 25 bp, Homo sapiens
gtttgcccggtcagatgaattagtc

SEQ ID NO: 14628 - DNA, 25 bp, Homo sapiens
tcagctgtcggtggccaagttgtca

SEQ ID NO: 14629 - DNA, 25 bp, Homo sapiens
tccgccatcacaacatgcatcagag

SEQ ID NO: 14630 - DNA, 25 bp, Homo sapiens
tgtcccacttacagatgcacagcag

SEQ ID NO: 14631 - DNA, 25 bp, Homo sapiens
tgtgtgcttacccaggctgcaataa

SEQ ID NO: 14632 - DNA, 25 bp, Homo sapiens
ttgtacggtcggcatctgagaccag

SEQ ID NO: 14633 - DNA, 25 bp, Homo sapiens
actggctccaagcctgatgagcccg

SEQ ID NO: 14634 - DNA, 25 bp, Homo sapiens
agcccagcctccaacggagactggg

SEQ ID NO: 14635 - DNA, 25 bp, Homo sapiens
cgccgtcctccaaggctgaagatgc

SEQ ID NO: 14636 - DNA, 25 bp, Homo sapiens
ctaaagcttccactgataactcgcc

SEQ ID NO: 14637 - DNA, 25 bp, Homo sapiens
gaaagtgcccggcaggacgagggta

SEQ ID NO: 14638 - DNA, 25 bp, Homo sapiens
gaagaggaacctgaggctgaccaag

SEQ ID NO: 14639 - DNA, 25 bp, Homo sapiens
gatgagcccggcaaagcaggagaaa

SEQ ID NO: 14640 - DNA, 25 bp, Homo sapiens
gctgaccaagaacatgcctgaactc

SEQ ID NO: 14641 - DNA, 25 bp, Homo sapiens
gtcctgctcacgtctgtgagtctgt

SEQ ID NO: 14642 - DNA, 25 bp, Homo sapiens
taaacaagccgatgtgcctgctgct

SEQ ID NO: 14643 - DNA, 25 bp, Homo sapiens
tcagaggagaaggccggctcagctg

SEQ ID NO: 14644 - DNA, 25 bp, Homo sapiens
ctacaccgcccagatcggagcggac

SEQ ID NO: 14645 - DNA, 25 bp, Homo sapiens
gagggactcatgccaggtggcgact

SEQ ID NO: 14646 - DNA, 25 bp, Homo sapiens
ggagctggaggagccggtgaacgtc

SEQ ID NO: 14647 - DNA, 25 bp, Homo sapiens
tcgtccgtgacgacatgctgtgtgc

SEQ ID NO: 14648 - DNA, 25 bp, Homo sapiens
tgtggacaatgatgagcgcctccca

SEQ ID NO: 14649 - DNA, 25 bp, Homo sapiens
agctcaagcccgaggacaaagatcc

SEQ ID NO: 14650 - DNA, 25 bp, Homo sapiens
atggaggacgccgtccagattctcc

SEQ ID NO: 14651 - DNA, 25 bp, Homo sapiens
ccagattctccttgttttcatggat

SEQ ID NO: 14652 - DNA, 25 bp, Homo sapiens
cccatccggcgtcactaatggagga

SEQ ID NO: 14653 - DNA, 25 bp, Homo sapiens
cgtctgcacgctctcaagttgcgaa

SEQ ID NO: 14654 - DNA, 25 bp, Homo sapiens
gaccccgaagagtcgaaggagccca

SEQ ID NO: 14655 - DNA, 25 bp, Homo sapiens
gaggacaaagatccaagggaccccg

SEQ ID NO: 14656 - DNA, 25 bp, Homo sapiens
gatccaagggaccccgaagagtcga

SEQ ID NO: 14657 - DNA, 25 bp, Homo sapiens
gattctccttgttttcatggattca

SEQ ID NO: 14658 - DNA, 25 bp, Homo sapiens
tctccttgttttcatggattcaggt

SEQ ID NO: 14659 - DNA, 25 bp, Homo sapiens
tctgcacgctctcaagttgcgaagc

SEQ ID NO: 14660 - DNA, 25 bp, Homo sapiens
tgcccgtgctggagagcttcaaggt

SEQ ID NO: 14661 - DNA, 25 bp, Homo sapiens
aaaatcacctcgatcaaaatcccca

SEQ ID NO: 14662 - DNA, 25 bp, Homo sapiens
gacacaccagaaaagaccacctaca

SEQ ID NO: 14663 - DNA, 25 bp, Homo sapiens
gggcctacagtcagaaaaccatcgc

SEQ ID NO: 14664 - DNA, 25 bp, Homo sapiens
tgcagaaacactgtcggctctggct

SEQ ID NO: 14665 - DNA, 25 bp, Homo sapiens
aatgcttctgcacacaaaactctct

SEQ ID NO: 14666 - DNA, 25 bp, Homo sapiens
acatgcatggatgggtcctcacgca

SEQ ID NO: 14667 - DNA, 25 bp, Homo sapiens
caaaactctctggtttacttcaaat

SEQ ID NO: 14668 - DNA, 25 bp, Homo sapiens
cacagaaggacactagcctggcgcg

SEQ ID NO: 14669 - DNA, 25 bp, Homo sapiens
cttatccataggcgcaggtgcacag

SEQ ID NO: 14670 - DNA, 25 bp, Homo sapiens
gagttcataatgtggtgatggccct

SEQ ID NO: 14671 - DNA, 25 bp, Homo sapiens
gctgtcaggattcttcaaggagaat

SEQ ID NO: 14672 - DNA, 25 bp, Homo sapiens
ggactataccttatccataggcgca

SEQ ID NO: 14673 - DNA, 25 bp, Homo sapiens
ggtgatggccctaagttaagcaaaa

SEQ ID NO: 14674 - DNA, 25 bp, Homo sapiens
gtgcacagggggaggccataaagat

SEQ ID NO: 14675 - DNA, 25 bp, Homo sapiens
tgggaatcaagacaggactatacct

SEQ ID NO: 14676 - DNA, 25 bp, Homo sapiens
aaaagggaaggtgactgaaggctgt

SEQ ID NO: 14677 - DNA, 25 bp, Homo sapiens
accgcacatttaaggcgccattgct

SEQ ID NO: 14678 - DNA, 25 bp, Homo sapiens
cctcatccttaccgcacatttaagg

SEQ ID NO: 14679 - DNA, 25 bp, Homo sapiens
ctatttcctgaactcagctgaggcc

SEQ ID NO: 14680 - DNA, 25 bp, Homo sapiens
cttaccgcacatttaaggcgccatt

SEQ ID NO: 14681 - DNA, 25 bp, Homo sapiens
gagcatgaaactcgacgcgttcttc

SEQ ID NO: 14682 - DNA, 25 bp, Homo sapiens
gcacctgagcatgaaactcgacgcg

SEQ ID NO: 14683 - DNA, 25 bp, Homo sapiens
gcatgaaactcgacgcgttcttcgg

SEQ ID NO: 14684 - DNA, 25 bp, Homo sapiens
ggtgactgaaggctgtcaggattct

SEQ ID NO: 14685 - DNA, 25 bp, Homo sapiens
gttctcctatttcctgaactcagct

SEQ ID NO: 14686 - DNA, 25 bp, Homo sapiens
tttaaggcgccattgcttttgggag

SEQ ID NO: 14687 - DNA, 25 bp, Homo sapiens
aaacattttctttttttctgagatg

SEQ ID NO: 14688 - DNA, 25 bp, Homo sapiens
accgtgcccagccatgtatatatat

SEQ ID NO: 14689 - DNA, 25 bp, Homo sapiens
cgtgcccagccatgtatatatataa

SEQ ID NO: 14690 - DNA, 25 bp, Homo sapiens
ctgatgtcaggtgattctcctagct

SEQ ID NO: 14691 - DNA, 25 bp, Homo sapiens
gaactcctgatgtcaggtgattctc

SEQ ID NO: 14692 - DNA, 25 bp, Homo sapiens
gatgtcaggtgattctcctagctcc

SEQ ID NO: 14693 - DNA, 25 bp, Homo sapiens
tatttttaggtgttcttgaactcct

SEQ ID NO: 14694 - DNA, 25 bp, Homo sapiens
tccaaacattttctttttttctgag

SEQ ID NO: 14695 - DNA, 25 bp, Homo sapiens
tcctgatgtcaggtgattctcctag

SEQ ID NO: 14696 - DNA, 25 bp, Homo sapiens
tgcccagccatgtatatatataatt

SEQ ID NO: 14697 - DNA, 25 bp, Homo sapiens
tgtatttttaggtgttcttgaactc

SEQ ID NO: 14698 - DNA, 25 bp, Homo sapiens
agcccctaaactcctgatctatgct

SEQ ID NO: 14699 - DNA, 25 bp, Homo sapiens
catcttctgtttctgcatctatagg

SEQ ID NO: 14700 - DNA, 25 bp, Homo sapiens
gacagagtcaccatcacttgtcggg

SEQ ID NO: 14701 - DNA, 25 bp, Homo sapiens
gatctgggacagatttcactctctc

SEQ ID NO: 14702 - DNA, 25 bp, Homo sapiens
gatttcgcaacttacttttgtcaac

SEQ ID NO: 14703 - DNA, 25 bp, Homo sapiens
gcagcctgcagcctgaagatttcgc

SEQ ID NO: 14704 - DNA, 25 bp, Homo sapiens
gcagtttgcaaagtggggtcccatc

SEQ ID NO: 14705 - DNA, 25 bp, Homo sapiens
ggtggttagcctggtatcaacagaa

SEQ ID NO: 14706 - DNA, 25 bp, Homo sapiens
ggttcagcggcagtggatctgggac

SEQ ID NO: 14707 - DNA, 25 bp, Homo sapiens
tcaacagactaacagtttcccgctc

SEQ ID NO: 14708 - DNA, 25 bp, Homo sapiens
tcagggtgttagcaggtggttagcc

SEQ ID NO: 14709 - DNA, 25 bp, Homo sapiens
aagagtgcaaatgcacctcctgcaa

SEQ ID NO: 14710 - DNA, 25 bp, Homo sapiens
caagaagagctgctgctcctgctgc

SEQ ID NO: 14711 - DNA, 25 bp, Homo sapiens
ctcctgcaagaagagctgctgctcc

SEQ ID NO: 14712 - DNA, 25 bp, Homo sapiens
gccccgtgggctgtagcaagtgtgc

SEQ ID NO: 14713 - DNA, 25 bp, Homo sapiens
gcgctggttcctgcaagtgcaaaga

SEQ ID NO: 14714 - DNA, 25 bp, Homo sapiens
gggctgtagcaagtgtgcccagggc

SEQ ID NO: 14715 - DNA, 25 bp, Homo sapiens
ggttcctgcaagtgcaaagagtgca

SEQ ID NO: 14716 - DNA, 25 bp, Homo sapiens
gtgtgcccagggctgtgtttgcaaa

SEQ ID NO: 14717 - DNA, 25 bp, Homo sapiens
tgcacctcctgcaagaagagctgct

SEQ ID NO: 14718 - DNA, 25 bp, Homo sapiens
tgcccagggctgtgtttgcaaaggg

SEQ ID NO: 14719 - DNA, 25 bp, Homo sapiens
tgtagcaagtgtgcccagggctgtg

SEQ ID NO: 14720 - DNA, 25 bp, Homo sapiens
agcctgagtggtggccgggggatat

SEQ ID NO: 14721 - DNA, 25 bp, Homo sapiens
aggacagagggtcaccatctcttgc

SEQ ID NO: 14722 - DNA, 25 bp, Homo sapiens
ataagcgaccctcagggattcctga

SEQ ID NO: 14723 - DNA, 25 bp, Homo sapiens
catctcttgctctggaagcagctcc

SEQ ID NO: 14724 - DNA, 25 bp, Homo sapiens
ccccaaactcctcatctataaaaat

SEQ ID NO: 14725 - DNA, 25 bp, Homo sapiens
gcatcaccagactccagactgggga

SEQ ID NO: 14726 - DNA, 25 bp, Homo sapiens
ggaacatgggatagcagcctgagtg

SEQ ID NO: 14727 - DNA, 25 bp, Homo sapiens
ggaagcagctccaacattgggaaga

SEQ ID NO: 14728 - DNA, 25 bp, Homo sapiens
ggggacgaggccgattattactgcg

SEQ ID NO: 14729 - DNA, 25 bp, Homo sapiens
tcagggattcctgaccgattctctg

SEQ ID NO: 14730 - DNA, 25 bp, Homo sapiens
tgtatcctggtaccagcaactccca

SEQ ID NO: 14731 - DNA, 25 bp, Homo sapiens
aattactgtaaactggtaccagcag

SEQ ID NO: 14732 - DNA, 25 bp, Homo sapiens
actgggctccagtctgaggatgagg

SEQ ID NO: 14733 - DNA, 25 bp, Homo sapiens
atagtaataatcagcggccctcagg

SEQ ID NO: 14734 - DNA, 25 bp, Homo sapiens
ccccaaactcctcatctatagtaat

SEQ ID NO: 14735 - DNA, 25 bp, Homo sapiens
ctggcagtcctatgacaggagtctg

SEQ ID NO: 14736 - DNA, 25 bp, Homo sapiens
gaagcagctccaacatcggggaaga

SEQ ID NO: 14737 - DNA, 25 bp, Homo sapiens
gacaggagtctgagtggtgtggtat

SEQ ID NO: 14738 - DNA, 25 bp, Homo sapiens
gaggctgattattactggcagtcct

SEQ ID NO: 14739 - DNA, 25 bp, Homo sapiens
gggaccccagggcagagggtcacca

SEQ ID NO: 14740 - DNA, 25 bp, Homo sapiens
gtaccagcagcttccaggaacagcc

SEQ ID NO: 14741 - DNA, 25 bp, Homo sapiens
gtcaccatctcttgttctggaagca

SEQ ID NO: 14742 - DNA, 25 bp, Homo sapiens
aaacccatcgacaagaaggcacctg

SEQ ID NO: 14743 - DNA, 25 bp, Homo sapiens
aaagattggctttccttggagtgaa

SEQ ID NO: 14744 - DNA, 25 bp, Homo sapiens
aaccatgagttgtatatgcgccgca

SEQ ID NO: 14745 - DNA, 25 bp, Homo sapiens
aggaacagacctttggcttggagtt

SEQ ID NO: 14746 - DNA, 25 bp, Homo sapiens
atatgcgccgcaggaagcctgacac

SEQ ID NO: 14747 - DNA, 25 bp, Homo sapiens
gagaatcaacaagcggatcctgcag

SEQ ID NO: 14748 - DNA, 25 bp, Homo sapiens
gatcctgcagctctgcatgggcaac

SEQ ID NO: 14749 - DNA, 25 bp, Homo sapiens
gatgcccttggactgaatatttatg

SEQ ID NO: 14750 - DNA, 25 bp, Homo sapiens
ggaagcctgacaccatcgaggtgca

SEQ ID NO: 14751 - DNA, 25 bp, Homo sapiens
ggcttggagttgatgcccttggact

SEQ ID NO: 14752 - DNA, 25 bp, Homo sapiens
tttatgccccacgtctgagaatcaa

SEQ ID NO: 14753 - DNA, 25 bp, Homo sapiens
agctcctacatcggggcaggttatg

SEQ ID NO: 14754 - DNA, 25 bp, Homo sapiens
atctatggtaacaccgatcggccct

SEQ ID NO: 14755 - DNA, 25 bp, Homo sapiens
atgtacactggtaccggcaacttcc

SEQ ID NO: 14756 - DNA, 25 bp, Homo sapiens
ccatcactgggctccaggctgagga

SEQ ID NO: 14757 - DNA, 25 bp, Homo sapiens
gatgaggctgattattactgcaagt

SEQ ID NO: 14758 - DNA, 25 bp, Homo sapiens
gcaagtcctatgacagcagcctgag

SEQ ID NO: 14759 - DNA, 25 bp, Homo sapiens
ggctgattattactgcaagtcctat

SEQ ID NO: 14760 - DNA, 25 bp, Homo sapiens
gggctccaggctgaggatgaggctg

SEQ ID NO: 14761 - DNA, 25 bp, Homo sapiens
ggggcaggttatgatgtacactggt

SEQ ID NO: 14762 - DNA, 25 bp, Homo sapiens
tcctgcactgggagcagctcctaca

SEQ ID NO: 14763 - DNA, 25 bp, Homo sapiens
aatcctaggcaccactgagttgttt

SEQ ID NO: 14764 - DNA, 25 bp, Homo sapiens
attaatattcccaatcctaggcacc

SEQ ID NO: 14765 - DNA, 25 bp, Homo sapiens
ctagcgttatgcatcgccacaatcc

SEQ ID NO: 14766 - DNA, 25 bp, Homo sapiens
ctaggttcaccagttgagggacatt

SEQ ID NO: 14767 - DNA, 25 bp, Homo sapiens
gaccctaagaagtttcctcatgtct

SEQ ID NO: 14768 - DNA, 25 bp, Homo sapiens
gcatggtgttcttgaggttcatctg

SEQ ID NO: 14769 - DNA, 25 bp, Homo sapiens
gctctgaatctatacctaatgctct

SEQ ID NO: 14770 - DNA, 25 bp, Homo sapiens
ggcgtcttgcacttagcatggtgtt

SEQ ID NO: 14771 - DNA, 25 bp, Homo sapiens
gtcaaactacaatttacatgccgta

SEQ ID NO: 14772 - DNA, 25 bp, Homo sapiens
tagtattttgtgtctggcgtcttgc

SEQ ID NO: 14773 - DNA, 25 bp, Homo sapiens
tgcatcgccacaatccagttttaga

SEQ ID NO: 14774 - DNA, 25 bp, Homo sapiens
agcacgtgctgcaggtagaggcctc

SEQ ID NO: 14775 - DNA, 25 bp, Homo sapiens
aggctcgcctgggcagagaacagca

SEQ ID NO: 14776 - DNA, 25 bp, Homo sapiens
cagcacgtggccagtatcatcagct

SEQ ID NO: 14777 - DNA, 25 bp, Homo sapiens
ccgctctttctcctggaatcagatg

SEQ ID NO: 14778 - DNA, 25 bp, Homo sapiens
gaagtcccaggcaatcactgtgtcc

SEQ ID NO: 14779 - DNA, 25 bp, Homo sapiens
ggagtccctgtcgttcatgatagac

SEQ ID NO: 14780 - DNA, 25 bp, Homo sapiens
gtgcgcattccatcaggaagctgca

SEQ ID NO: 14781 - DNA, 25 bp, Homo sapiens
taaacttatcttgctggacacgccg

SEQ ID NO: 14782 - DNA, 25 bp, Homo sapiens
tagacacgatgaaatccaccctcaa

SEQ ID NO: 14783 - DNA, 25 bp, Homo sapiens
tgcaggcccatgtcctgttgatcaa

SEQ ID NO: 14784 - DNA, 25 bp, Homo sapiens
tggccacaggtctggttctgaacag

SEQ ID NO: 14785 - DNA, 25 bp, Homo sapiens
atctcagagcttctcctgcaaagag

SEQ ID NO: 14786 - DNA, 25 bp, Homo sapiens
gaacagcattgacttcatcagcagg

SEQ ID NO: 14787 - DNA, 25 bp, Homo sapiens
ggctcgcctgggcagagaacagcat

SEQ ID NO: 14788 - DNA, 25 bp, Homo sapiens
tgaacagagaccagaggctcgcctg

SEQ ID NO: 14789 - DNA, 25 bp, Homo sapiens
caccatgtctattctcaagatccat

SEQ ID NO: 14790 - DNA, 25 bp, Homo sapiens
cagggagatctttgactctcgcggg

SEQ ID NO: 14791 - DNA, 25 bp, Homo sapiens
cgcgggaatcccactgttgaggttg

SEQ ID NO: 14792 - DNA, 25 bp, Homo sapiens
ctaggcgacgagacccagtggctag

SEQ ID NO: 14793 - DNA, 25 bp, Homo sapiens
ctctcgcgggaatcccactgttgag

SEQ ID NO: 14794 - DNA, 25 bp, Homo sapiens
gacccagtggctagaagttcaccat

SEQ ID NO: 14795 - DNA, 25 bp, Homo sapiens
gcttttgcagtcgtgtaatgggccc

SEQ ID NO: 14796 - DNA, 25 bp, Homo sapiens
ggctagaagttcaccatgtctattc

SEQ ID NO: 14797 - DNA, 25 bp, Homo sapiens
tctcaagatccatgccagggagatc

SEQ ID NO: 14798 - DNA, 25 bp, Homo sapiens
tgaggttgatctcttcacctcaaaa

SEQ ID NO: 14799 - DNA, 25 bp, Homo sapiens
ttgcagtcgtgtaatgggcccaagt

SEQ ID NO: 14800 - DNA, 25 bp, Homo sapiens
aaattctgccagtaaatctcatgct

SEQ ID NO: 14801 - DNA, 25 bp, Homo sapiens
agcatctatctgagaatgagcctgt

SEQ ID NO: 14802 - DNA, 25 bp, Homo sapiens
atgatagtgagatgcttccaaaaaa

SEQ ID NO: 14803 - DNA, 25 bp, Homo sapiens
cagtgatgaagcagtaccagaaagt

SEQ ID NO: 14804 - DNA, 25 bp, Homo sapiens
gaactcaaggaagactcactatggt

SEQ ID NO: 14805 - DNA, 25 bp, Homo sapiens
gaagactcactatggtcagctaaag

SEQ ID NO: 14806 - DNA, 25 bp, Homo sapiens
gactgaatttagatcactggtgatt

SEQ ID NO: 14807 - DNA, 25 bp, Homo sapiens
gagcctgtggacacaaactcagaca

SEQ ID NO: 14808 - DNA, 25 bp, Homo sapiens
tagaacaaacacaacctgctacacc

SEQ ID NO: 14809 - DNA, 25 bp, Homo sapiens
tgccagtaaatctcatgctgcagaa

SEQ ID NO: 14810 - DNA, 25 bp, Homo sapiens
ttggaacagttattcaaggacacaa

SEQ ID NO: 14811 - DNA, 25 bp, Homo sapiens
agactgttatcgagtaccggtcaca

SEQ ID NO: 14812 - DNA, 25 bp, Homo sapiens
atcattgacattgcacccatggaca

SEQ ID NO: 14813 - DNA, 25 bp, Homo sapiens
atggtggcttccatttcagctatgg

SEQ ID NO: 14814 - DNA, 25 bp, Homo sapiens
caatccagcaaacgttcccaagaag

SEQ ID NO: 14815 - DNA, 25 bp, Homo sapiens
gagactggcgagacttgcgtctacc

SEQ ID NO: 14816 - DNA, 25 bp, Homo sapiens
gagggcaatagcaggttcacgtaca

SEQ ID NO: 14817 - DNA, 25 bp, Homo sapiens
ggacgccatgaaggttttctgcaac

SEQ ID NO: 14818 - DNA, 25 bp, Homo sapiens
ggagatgacaatctggctcccaaca

SEQ ID NO: 14819 - DNA, 25 bp, Homo sapiens
ggatggctgcacgaaacataccggt

SEQ ID NO: 14820 - DNA, 25 bp, Homo sapiens
tctggacgaagcagctggcaacctc

SEQ ID NO: 14821 - DNA, 25 bp, Homo sapiens
tggacataggagggcccgagcagga

SEQ ID NO: 14822 - DNA, 25 bp, Homo sapiens
aagatggcattagctacaccaccct

SEQ ID NO: 14823 - DNA, 25 bp, Homo sapiens
agaccatcggcaggcgagtggctgt

SEQ ID NO: 14824 - DNA, 25 bp, Homo sapiens
agagctgatccagtttggggtcggg

SEQ ID NO: 14825 - DNA, 25 bp, Homo sapiens
agcattgcacaagcgccaagtgggc

SEQ ID NO: 14826 - DNA, 25 bp, Homo sapiens
cactccctgggatgctacaatccaa

SEQ ID NO: 14827 - DNA, 25 bp, Homo sapiens
gacacggtcacttattcagcattgc

SEQ ID NO: 14828 - DNA, 25 bp, Homo sapiens
gagaacgtcattccagattttccag

SEQ ID NO: 14829 - DNA, 25 bp, Homo sapiens
gctcaagctccagcgacgttggaag

SEQ ID NO: 14830 - DNA, 25 bp, Homo sapiens
gggcttcaggagaattccagcggcc

SEQ ID NO: 14831 - DNA, 25 bp, Homo sapiens
gtctactatagcccggagaccatcg

SEQ ID NO: 14832 - DNA, 25 bp, Homo sapiens
tgcgctttcccgagatgaacatacc

SEQ ID NO: 14833 - DNA, 25 bp, Homo sapiens
agctgtgcctcacttattaaagcac

SEQ ID NO: 14834 - DNA, 25 bp, Homo sapiens
atttatttatgcactgtactgtatt

SEQ ID NO: 14835 - DNA, 25 bp, Homo sapiens
ctgagggtttcaaaattcgactaga

SEQ ID NO: 14836 - DNA, 25 bp, Homo sapiens
ctggatttacagaacattagcacat

SEQ ID NO: 14837 - DNA, 25 bp, Homo sapiens
gaaacaggtatctgacctattctta

SEQ ID NO: 14838 - DNA, 25 bp, Homo sapiens
ggtgctttcatcaatgaaccttttc

SEQ ID NO: 14839 - DNA, 25 bp, Homo sapiens
gttcatctgaaatgcaaggtgcttt

SEQ ID NO: 14840 - DNA, 25 bp, Homo sapiens
tatggcccctttcatcaatatctat

SEQ ID NO: 14841 - DNA, 25 bp, Homo sapiens
tctgatggtgcactactctgaggcc

SEQ ID NO: 14842 - DNA, 25 bp, Homo sapiens
ttagcacatgtaccttgtgcctccc

SEQ ID NO: 14843 - DNA, 25 bp, Homo sapiens
ttgtgcctcccattcaagtgaagtt

SEQ ID NO: 14844 - DNA, 25 bp, Homo sapiens
aaactcctaagctcctgatctatgc

SEQ ID NO: 14845 - DNA, 25 bp, Homo sapiens
aggagacagagtcaccatcacttgc

SEQ ID NO: 14846 - DNA, 25 bp, Homo sapiens
atcacttgccgggcgagtcagggca

SEQ ID NO: 14847 - DNA, 25 bp, Homo sapiens
gcaaagtgggattccctctcggttc

SEQ ID NO: 14848 - DNA, 25 bp, Homo sapiens
gcagcctgcagcctgaagattttgc

SEQ ID NO: 14849 - DNA, 25 bp, Homo sapiens
gctgccaggtgccagatgtgacatc

SEQ ID NO: 14850 - DNA, 25 bp, Homo sapiens
tccctctcggttcagtgacagtgga

SEQ ID NO: 14851 - DNA, 25 bp, Homo sapiens
tcctccctgtctgcatctgtaggag

SEQ ID NO: 14852 - DNA, 25 bp, Homo sapiens
tctggggcagattacactctcacca

SEQ ID NO: 14853 - DNA, 25 bp, Homo sapiens
tgctgcacccagtctgcaaagtggg

SEQ ID NO: 14854 - DNA, 25 bp, Homo sapiens
tgtgacatccagatgacccagtctc

SEQ ID NO: 14855 - DNA, 25 bp, Homo sapiens
aactgtggcacttggtatttgaatg

SEQ ID NO: 14856 - DNA, 25 bp, Homo sapiens
aagtggctatgggtatttctttcat

SEQ ID NO: 14857 - DNA, 25 bp, Homo sapiens
aatatcctgatataatgcaccaaaa

SEQ ID NO: 14858 - DNA, 25 bp, Homo sapiens
caattctaactcttttctgaatctt

SEQ ID NO: 14859 - DNA, 25 bp, Homo sapiens
cctctctccattgtccagatgaaaa

SEQ ID NO: 14860 - DNA, 25 bp, Homo sapiens
ctcactgatggcctttcttaattta

SEQ ID NO: 14861 - DNA, 25 bp, Homo sapiens
gagaagtggtgagactcccagtgga

SEQ ID NO: 14862 - DNA, 25 bp, Homo sapiens
gtctccacggactgcataaaattgt

SEQ ID NO: 14863 - DNA, 25 bp, Homo sapiens
gtgtgccacaattctaactcttttc

SEQ ID NO: 14864 - DNA, 25 bp, Homo sapiens
tggtgagactcccagtggagacacc

SEQ ID NO: 14865 - DNA, 25 bp, Homo sapiens
ttaaagtatcaatatccctctctcc

SEQ ID NO: 14866 - DNA, 25 bp, Homo sapiens
aactctggtatctgtttgtttgctt

SEQ ID NO: 14867 - DNA, 25 bp, Homo sapiens
aattttgattgacctctgggatgtt

SEQ ID NO: 14868 - DNA, 25 bp, Homo sapiens
atgctcattccctaagatagcctga

SEQ ID NO: 14869 - DNA, 25 bp, Homo sapiens
atggcaccaataagcagatttcttc

SEQ ID NO: 14870 - DNA, 25 bp, Homo sapiens
cacaaattttcgttatgacttcaga

SEQ ID NO: 14871 - DNA, 25 bp, Homo sapiens
gaaggatcattaactctggtatctg

SEQ ID NO: 14872 - DNA, 25 bp, Homo sapiens
gagttattattatctcatagcgtat

SEQ ID NO: 14873 - DNA, 25 bp, Homo sapiens
gatgttattaaagcctaacgttcct

SEQ ID NO: 14874 - DNA, 25 bp, Homo sapiens
ggaactattcttggggtagacacta

SEQ ID NO: 14875 - DNA, 25 bp, Homo sapiens
gtttgtttgcttgtatggcaccaat

SEQ ID NO: 14876 - DNA, 25 bp, Homo sapiens
tccttctattctcacaaattttcgt

SEQ ID NO: 14877 - DNA, 25 bp, Homo sapiens
aaagatgttattctgagtttgtttt

SEQ ID NO: 14878 - DNA, 25 bp, Homo sapiens
agcagggagatactaacctttggaa

SEQ ID NO: 14879 - DNA, 25 bp, Homo sapiens
atagcccttataatgccttaactaa

SEQ ID NO: 14880 - DNA, 25 bp, Homo sapiens
caagagttacttaccaagggcaggg

SEQ ID NO: 14881 - DNA, 25 bp, Homo sapiens
ctttctccatcaagagttacttacc

SEQ ID NO: 14882 - DNA, 25 bp, Homo sapiens
ctttggaaatgattagctggctctg

SEQ ID NO: 14883 - DNA, 25 bp, Homo sapiens
gaaataaaaatcatctttcatcttt

SEQ ID NO: 14884 - DNA, 25 bp, Homo sapiens
gaaatgattagctggctctgttttt

SEQ ID NO: 14885 - DNA, 25 bp, Homo sapiens
gatgaaatctcactgctaatgctca

SEQ ID NO: 14886 - DNA, 25 bp, Homo sapiens
ggggaagggggatatagaggtcaca

SEQ ID NO: 14887 - DNA, 25 bp, Homo sapiens
ttgccttggttattatggatgatag

SEQ ID NO: 14888 - DNA, 25 bp, Homo sapiens
aattatttcttgttactgtattgat

SEQ ID NO: 14889 - DNA, 25 bp, Homo sapiens
agtaatgacattctacagtttttat

SEQ ID NO: 14890 - DNA, 25 bp, Homo sapiens
attccctatgtatgatttggctctg

SEQ ID NO: 14891 - DNA, 25 bp, Homo sapiens
ctctgtaatctgcattccctatgta

SEQ ID NO: 14892 - DNA, 25 bp, Homo sapiens
cttagtgcagttctcatcaattatt

SEQ ID NO: 14893 - DNA, 25 bp, Homo sapiens
cttatctctttccaaccatatttat

SEQ ID NO: 14894 - DNA, 25 bp, Homo sapiens
gcttaggcatatcttagtgcagttc

SEQ ID NO: 14895 - DNA, 25 bp, Homo sapiens
ggactgtgtttgtatggtcagcctc

SEQ ID NO: 14896 - DNA, 25 bp, Homo sapiens
ggccaactctactcatctatgaagt

SEQ ID NO: 14897 - DNA, 25 bp, Homo sapiens
gtgcttgccattctggccagtaatg

SEQ ID NO: 14898 - DNA, 25 bp, Homo sapiens
tatggtcagcctcactgacttctct

SEQ ID NO: 14899 - DNA, 25 bp, Homo sapiens
atactgtatttttggtggactaggc

SEQ ID NO: 14900 - DNA, 25 bp, Homo sapiens
atctgcaaactcaggacactttaac

SEQ ID NO: 14901 - DNA, 25 bp, Homo sapiens
attctgtgtcttttgcaattaaatt

SEQ ID NO: 14902 - DNA, 25 bp, Homo sapiens
ccttaatattctgtgtcttttgcaa

SEQ ID NO: 14903 - DNA, 25 bp, Homo sapiens
gacactttaacagggcagaatactc

SEQ ID NO: 14904 - DNA, 25 bp, Homo sapiens
gcctatgtgcttatgtgtagctttt

SEQ ID NO: 14905 - DNA, 25 bp, Homo sapiens
taggcttgcctatgtgcttatgtgt

SEQ ID NO: 14906 - DNA, 25 bp, Homo sapiens
tcaaaaccttacagtccttcctaag

SEQ ID NO: 14907 - DNA, 25 bp, Homo sapiens
ttcatccatttactaatactgtatt

SEQ ID NO: 14908 - DNA, 25 bp, Homo sapiens
tttaaaacactatctgcaaactcag

SEQ ID NO: 14909 - DNA, 25 bp, Homo sapiens
tttttggtggactaggcttgcctat

SEQ ID NO: 14910 - DNA, 25 bp, Homo sapiens
aacacacctgatgtcactttgagcc

SEQ ID NO: 14911 - DNA, 25 bp, Homo sapiens
acttttctgtccctactgtgatgaa

SEQ ID NO: 14912 - DNA, 25 bp, Homo sapiens
ataggccttatgatatgcacgaatt

SEQ ID NO: 14913 - DNA, 25 bp, Homo sapiens
ctactgtgatgaatagccccaccct

SEQ ID NO: 14914 - DNA, 25 bp, Homo sapiens
ctgatgtcactttgagccatatagt

SEQ ID NO: 14915 - DNA, 25 bp, Homo sapiens
gctgcttcctggaaagcttcatgtt

SEQ ID NO: 14916 - DNA, 25 bp, Homo sapiens
ggttgaggtctacctaacctaagct

SEQ ID NO: 14917 - DNA, 25 bp, Homo sapiens
gtcagtactgaattcctgcttgtta

SEQ ID NO: 14918 - DNA, 25 bp, Homo sapiens
gttgaaagaacctatgggtggcacc

SEQ ID NO: 14919 - DNA, 25 bp, Homo sapiens
tacctaacctaagctgcttcctgga

SEQ ID NO: 14920 - DNA, 25 bp, Homo sapiens
tatgggtggcaccatgtggactttt

SEQ ID NO: 14921 - DNA, 25 bp, Homo sapiens
agaaagaacacggcttgcctgctcc

SEQ ID NO: 14922 - DNA, 25 bp, Homo sapiens
atgggagtggtttctctgtttcttt

SEQ ID NO: 14923 - DNA, 25 bp, Homo sapiens
atttgtggcactgttttgtcttctg

SEQ ID NO: 14924 - DNA, 25 bp, Homo sapiens
ctgctccctctcttgaagattgatt

SEQ ID NO: 14925 - DNA, 25 bp, Homo sapiens
gagcaccacactgtaatactagacc

SEQ ID NO: 14926 - DNA, 25 bp, Homo sapiens
gcatgactcccctttaaacgtcagt

SEQ ID NO: 14927 - DNA, 25 bp, Homo sapiens
gggtcatctactgcttatttgtggc

SEQ ID NO: 14928 - DNA, 25 bp, Homo sapiens
gtaagtggaagctgaccaggttgtc

SEQ ID NO: 14929 - DNA, 25 bp, Homo sapiens
gttgggagagtatcactgttctgat

SEQ ID NO: 14930 - DNA, 25 bp, Homo sapiens
tcttgtcacagggtcatctactgct

SEQ ID NO: 14931 - DNA, 25 bp, Homo sapiens
ttcacagcttgtcagagtctataca

SEQ ID NO: 14932 - DNA, 25 bp, Homo sapiens
acctatactatgccaatatttcctt

SEQ ID NO: 14933 - DNA, 25 bp, Homo sapiens
atgcacgtgaaacttaacactttat

SEQ ID NO: 14934 - DNA, 25 bp, Homo sapiens
atgtgggagaaaatcgctgctgctg

SEQ ID NO: 14935 - DNA, 25 bp, Homo sapiens
atttccttatatctatccataacat

SEQ ID NO: 14936 - DNA, 25 bp, Homo sapiens
catctataactgggcctacggcttt

SEQ ID NO: 14937 - DNA, 25 bp, Homo sapiens
gaagatgaccttctgggcaatgcca

SEQ ID NO: 14938 - DNA, 25 bp, Homo sapiens
gtgtcttttcactaattacctatac

SEQ ID NO: 14939 - DNA, 25 bp, Homo sapiens
tccaggcgactttgaacccattttt

SEQ ID NO: 14940 - DNA, 25 bp, Homo sapiens
tctgatcaagttcttgttatttcca

SEQ ID NO: 14941 - DNA, 25 bp, Homo sapiens
tgctgtcacttacatctataactgg

SEQ ID NO: 14942 - DNA, 25 bp, Homo sapiens
ttctacacatctgcctaacttggga

SEQ ID NO: 14943 - DNA, 25 bp, Homo sapiens
aacactacctcatgtggggtctctc

SEQ ID NO: 14944 - DNA, 25 bp, Homo sapiens
aagctctgccgtgatgaactgtgcc

SEQ ID NO: 14945 - DNA, 25 bp, Homo sapiens
agaaacaatgccaggacctcggcgc

SEQ ID NO: 14946 - DNA, 25 bp, Homo sapiens
cgccttcaccgagagcatggttgtc

SEQ ID NO: 14947 - DNA, 25 bp, Homo sapiens
gaacggctggacaaggcctgtgagc

SEQ ID NO: 14948 - DNA, 25 bp, Homo sapiens
gcagaccatcaagtcaggctcggat

SEQ ID NO: 14949 - DNA, 25 bp, Homo sapiens
ggtctacgcctattacaacctggag

SEQ ID NO: 14950 - DNA, 25 bp, Homo sapiens
ggttcagctgtccaatgactttgac

SEQ ID NO: 14951 - DNA, 25 bp, Homo sapiens
gtctctcctccgatttctggggaga

SEQ ID NO: 14952 - DNA, 25 bp, Homo sapiens
gtggagcactggcctgaggaggacg

SEQ ID NO: 14953 - DNA, 25 bp, Homo sapiens
tcatcagccccatcaagtgcagaga

SEQ ID NO: 14954 - DNA, 25 bp, Homo sapiens
aaggtggatgtggtggccgagaccc

SEQ ID NO: 14955 - DNA, 25 bp, Homo sapiens
ccagggagtcccttttgatgggaag

SEQ ID NO: 14956 - DNA, 25 bp, Homo sapiens
ccttggacagtgggatgtggtgttc

SEQ ID NO: 14957 - DNA, 25 bp, Homo sapiens
ccttttgatgggaagtgcagtcagc

SEQ ID NO: 14958 - DNA, 25 bp, Homo sapiens
cgaggaggggtggactccaccttgg

SEQ ID NO: 14959 - DNA, 25 bp, Homo sapiens
gatgtggtgttccacatgtgcctgt

SEQ ID NO: 14960 - DNA, 25 bp, Homo sapiens
gcaccttgacttggcagcatggagc

SEQ ID NO: 14961 - DNA, 25 bp, Homo sapiens
gcagcatggagccaaggtctgtccc

SEQ ID NO: 14962 - DNA, 25 bp, Homo sapiens
gtgtctgggccaccttcagaaggtg

SEQ ID NO: 14963 - DNA, 25 bp, Homo sapiens
tcagaaggtggatgtggtggccgag

SEQ ID NO: 14964 - DNA, 25 bp, Homo sapiens
tgccccagggagtcccttttgatgg

SEQ ID NO: 14965 - DNA, 25 bp, Homo sapiens
aagttggtcttaagcttccaccttg

SEQ ID NO: 14966 - DNA, 25 bp, Homo sapiens
acctgcctcttttagcataatcaca

SEQ ID NO: 14967 - DNA, 25 bp, Homo sapiens
attgttgaatggtgtcatgcaaagg

SEQ ID NO: 14968 - DNA, 25 bp, Homo sapiens
cttgactgaagatattttgctaggg

SEQ ID NO: 14969 - DNA, 25 bp, Homo sapiens
gacatctaagtctgtagcttaaatg

SEQ ID NO: 14970 - DNA, 25 bp, Homo sapiens
gcagccttggaaacctaacctgcct

SEQ ID NO: 14971 - DNA, 25 bp, Homo sapiens
ggatttatatagtgtgctcccacta

SEQ ID NO: 14972 - DNA, 25 bp, Homo sapiens
gtaaatatcacttgtgtactcaaac

SEQ ID NO: 14973 - DNA, 25 bp, Homo sapiens
gtacagatcaggacacatattttta

SEQ ID NO: 14974 - DNA, 25 bp, Homo sapiens
tactcttccatcatctagaattgtt

SEQ ID NO: 14975 - DNA, 25 bp, Homo sapiens
tggaggttactcttccatcatctag

SEQ ID NO: 14976 - DNA, 25 bp, Homo sapiens
aaatactgcaggtaaccgcaatcta

SEQ ID NO: 14977 - DNA, 25 bp, Homo sapiens
agctttttttcccatactgtatgta

SEQ ID NO: 14978 - DNA, 25 bp, Homo sapiens
aggccttagcttccatggtgatttt

SEQ ID NO: 14979 - DNA, 25 bp, Homo sapiens
cttcttccccttaacatttacagtg

SEQ ID NO: 14980 - DNA, 25 bp, Homo sapiens
gaagcatagtggtactctgtttcac

SEQ ID NO: 14981 - DNA, 25 bp, Homo sapiens
gccattgtttcatttaaggttcagt

SEQ ID NO: 14982 - DNA, 25 bp, Homo sapiens
ggaatgagaatttaggccttagctt

SEQ ID NO: 14983 - DNA, 25 bp, Homo sapiens
ggtaaccgcaatctaagttagccaa

SEQ ID NO: 14984 - DNA, 25 bp, Homo sapiens
ggtactctgtttcacactttcagta

SEQ ID NO: 14985 - DNA, 25 bp, Homo sapiens
ggttcagtgcttatagttaactaca

SEQ ID NO: 14986 - DNA, 25 bp, Homo sapiens
gtgatgctatttgtcaactggatat

SEQ ID NO: 14987 - DNA, 25 bp, Homo sapiens
aatgcatttcctctggagtttgaga

SEQ ID NO: 14988 - DNA, 25 bp, Homo sapiens
acagctccaagttcagacaggtgcc

SEQ ID NO: 14989 - DNA, 25 bp, Homo sapiens
atgcggctcaagtcactcagaggct

SEQ ID NO: 14990 - DNA, 25 bp, Homo sapiens
gagcttgtctttcaaggcaggttcc

SEQ ID NO: 14991 - DNA, 25 bp, Homo sapiens
gaggctgttgcatttcagggctatg

SEQ ID NO: 14992 - DNA, 25 bp, Homo sapiens
gatgttagggcgagaccctgcaagt

SEQ ID NO: 14993 - DNA, 25 bp, Homo sapiens
tatgttggtcctttgtttacctcct

SEQ ID NO: 14994 - DNA, 25 bp, Homo sapiens
tcaggtggagagtaggcccaggccc

SEQ ID NO: 14995 - DNA, 25 bp, Homo sapiens
tggtgtgctgttcttgagttttcgt

SEQ ID NO: 14996 - DNA, 25 bp, Homo sapiens
ttgtcaccttcttggacttattccc

SEQ ID NO: 14997 - DNA, 25 bp, Homo sapiens
ttttaacagaaccccagtcacatgc

SEQ ID NO: 14998 - DNA, 25 bp, Homo sapiens
aaacagtattgcaatgacaccatta

SEQ ID NO: 14999 - DNA, 25 bp, Homo sapiens
aggtttagtcagagctttcacaagt

SEQ ID NO: 15000 - DNA, 25 bp, Homo sapiens
cactaatgcgcaccacatatttatg

SEQ ID NO: 15001 - DNA, 25 bp, Homo sapiens
cccttttttttgcagtgctaacttg

SEQ ID NO: 15002 - DNA, 25 bp, Homo sapiens
gactggtggcaagtacacagccctt

SEQ ID NO: 15003 - DNA, 25 bp, Homo sapiens
gagtaaccctttctgtattgagtgc

SEQ ID NO: 15004 - DNA, 25 bp, Homo sapiens
ggttttcgtcttagttgtagcacac

SEQ ID NO: 15005 - DNA, 25 bp, Homo sapiens
gtaacttctccacagaagtgccaat

SEQ ID NO: 15006 - DNA, 25 bp, Homo sapiens
gtagcacacttaccctaattttgcc

SEQ ID NO: 15007 - DNA, 25 bp, Homo sapiens
gttttgttacactaatgcgcaccac

SEQ ID NO: 15008 - DNA, 25 bp, Homo sapiens
tgttagaggagtgctcttccaaaca

SEQ ID NO: 15009 - DNA, 25 bp, Homo sapiens
aacaaaagtgacctcagccaggccc

SEQ ID NO: 15010 - DNA, 25 bp, Homo sapiens
agaacagcatccggaccaatgccat

SEQ ID NO: 15011 - DNA, 25 bp, Homo sapiens
agccctggactctaccaatgttgag

SEQ ID NO: 15012 - DNA, 25 bp, Homo sapiens
caatgccatcactctgggcagtgcc

SEQ ID NO: 15013 - DNA, 25 bp, Homo sapiens
cacgatcgtcgtcatgctcgtgggt

SEQ ID NO: 15014 - DNA, 25 bp, Homo sapiens
cactgaggaggcccgaatgttcgct

SEQ ID NO: 15015 - DNA, 25 bp, Homo sapiens
gcaccctcagggtcttaaggtcttc

SEQ ID NO: 15016 - DNA, 25 bp, Homo sapiens
ggttccagatatcagactgttccct

SEQ ID NO: 15017 - DNA, 25 bp, Homo sapiens
tcacctcggcgtactatcgtggtgc

SEQ ID NO: 15018 - DNA, 25 bp, Homo sapiens
tgaccatgctgaagccacgatcgtc

SEQ ID NO: 15019 - DNA, 25 bp, Homo sapiens
tgttgagctagcctttgagactgtc

SEQ ID NO: 15020 - DNA, 25 bp, Homo sapiens
aaaggaatgtccatttgctgagttt

SEQ ID NO: 15021 - DNA, 25 bp, Homo sapiens
agtctggtgccaggtagtggagtaa

SEQ ID NO: 15022 - DNA, 25 bp, Homo sapiens
atttttttattctatgtgcacactt

SEQ ID NO: 15023 - DNA, 25 bp, Homo sapiens
cataggggactgaggagcaagggtg

SEQ ID NO: 15024 - DNA, 25 bp, Homo sapiens
ggagcaagggtggccttgaagaggc

SEQ ID NO: 15025 - DNA, 25 bp, Homo sapiens
ggaggatagcgagaagatgctctgg

SEQ ID NO: 15026 - DNA, 25 bp, Homo sapiens
ggctttggccagtagctaaagtgca

SEQ ID NO: 15027 - DNA, 25 bp, Homo sapiens
gtacagttattatagggcttttggg

SEQ ID NO: 15028 - DNA, 25 bp, Homo sapiens
gttgagtttccaatggaacccttgt

SEQ ID NO: 15029 - DNA, 25 bp, Homo sapiens
tccttatgtctccagtctggtgcca

SEQ ID NO: 15030 - DNA, 25 bp, Homo sapiens
tgtgcacacttacagtatacatata

SEQ ID NO: 15031 - DNA, 25 bp, Homo sapiens
aattacctgccttagcgggtgttgc

SEQ ID NO: 15032 - DNA, 25 bp, Homo sapiens
cccatccccctgattttatatgaag

SEQ ID NO: 15033 - DNA, 25 bp, Homo sapiens
cctcttccttattccataggctggg

SEQ ID NO: 15034 - DNA, 25 bp, Homo sapiens
cgctacatcacccagagtggcgatt

SEQ ID NO: 15035 - DNA, 25 bp, Homo sapiens
cttacagccccggatgcagatttta

SEQ ID NO: 15036 - DNA, 25 bp, Homo sapiens
ggcaggtcctggacttggcagtttc

SEQ ID NO: 15037 - DNA, 25 bp, Homo sapiens
tcaagtttgagatcccctacttcac

SEQ ID NO: 15038 - DNA, 25 bp, Homo sapiens
tctgggatccaggtccgatacatga

SEQ ID NO: 15039 - DNA, 25 bp, Homo sapiens
tgaacacggggcttccttacagccc

SEQ ID NO: 15040 - DNA, 25 bp, Homo sapiens
tggcgattaccaacttcgtaccagc

SEQ ID NO: 15041 - DNA, 25 bp, Homo sapiens
tttggcctccccagtgtggaaaagg

SEQ ID NO: 15042 - DNA, 25 bp, Homo sapiens
cagctctgagtcaaatctgggccct

SEQ ID NO: 15043 - DNA, 25 bp, Homo sapiens
cccactcccttgctaggggtgaaag

SEQ ID NO: 15044 - DNA, 25 bp, Homo sapiens
ctgttctggactctgatgtgtgtgg

SEQ ID NO: 15045 - DNA, 25 bp, Homo sapiens
gagccatctatccaagaagccttca

SEQ ID NO: 15046 - DNA, 25 bp, Homo sapiens
gcacctgtttaagcattgtacccct

SEQ ID NO: 15047 - DNA, 25 bp, Homo sapiens
gccagcctgaccttttaataacttt

SEQ ID NO: 15048 - DNA, 25 bp, Homo sapiens
ggctcagcatccagaaacaccaaac

SEQ ID NO: 15049 - DNA, 25 bp, Homo sapiens
ggctggctaaacaagtggccgcgtg

SEQ ID NO: 15050 - DNA, 25 bp, Homo sapiens
ggtgtagtggctttttggctcagca

SEQ ID NO: 15051 - DNA, 25 bp, Homo sapiens
gttaaagatttgtgtcctctcattc

SEQ ID NO: 15052 - DNA, 25 bp, Homo sapiens
tcctcttgtaagtgcccttctaata

SEQ ID NO: 15053 - DNA, 25 bp, Homo sapiens
aatgcttggagtgtcttttctgtta

SEQ ID NO: 15054 - DNA, 25 bp, Homo sapiens
agctgcctgttttgcatggtatttg

SEQ ID NO: 15055 - DNA, 25 bp, Homo sapiens
cttgcgtgaggaaatcttttaccat

SEQ ID NO: 15056 - DNA, 25 bp, Homo sapiens
gcaagctatctgcccaagttaatgc

SEQ ID NO: 15057 - DNA, 25 bp, Homo sapiens
gtgagcagcctgtttatttctctaa

SEQ ID NO: 15058 - DNA, 25 bp, Homo sapiens
gttgtaaagcgtgtgtttctttgtt

SEQ ID NO: 15059 - DNA, 25 bp, Homo sapiens
gtttgcaactttggacctcaagagg

SEQ ID NO: 15060 - DNA, 25 bp, Homo sapiens
tagggattctcttaaggcacaccag

SEQ ID NO: 15061 - DNA, 25 bp, Homo sapiens
tgtgctctgagtccacgtacaggaa

SEQ ID NO: 15062 - DNA, 25 bp, Homo sapiens
ttccccttgcagtctgttgtgtgag

SEQ ID NO: 15063 - DNA, 25 bp, Homo sapiens
ttgttgctgcaagctatctgcccaa

SEQ ID NO: 15064 - DNA, 25 bp, Homo sapiens
ataatttagttactacctcatacaa

SEQ ID NO: 15065 - DNA, 25 bp, Homo sapiens
atacctttgaacatttttgaatcac

SEQ ID NO: 15066 - DNA, 25 bp, Homo sapiens
cacacttttggctctttttggtata

SEQ ID NO: 15067 - DNA, 25 bp, Homo sapiens
gaagtggttcaaatttctcttggaa

SEQ ID NO: 15068 - DNA, 25 bp, Homo sapiens
gaatactgcaattgtggtcagaatt

SEQ ID NO: 15069 - DNA, 25 bp, Homo sapiens
gcggtaccatgatagaatactgcaa

SEQ ID NO: 15070 - DNA, 25 bp, Homo sapiens
gttggccttattttatgatcctttt

SEQ ID NO: 15071 - DNA, 25 bp, Homo sapiens
taatggttactacacatcacaggaa

SEQ ID NO: 15072 - DNA, 25 bp, Homo sapiens
tgaatcacagaatagcggtaccatg

SEQ ID NO: 15073 - DNA, 25 bp, Homo sapiens
ttacttttgttggccttattttatg

SEQ ID NO: 15074 - DNA, 25 bp, Homo sapiens
ttagcattattaaagagtcctcact

SEQ ID NO: 15075 - DNA, 25 bp, Homo sapiens
agaactaggactgctcagccttatc

SEQ ID NO: 15076 - DNA, 25 bp, Homo sapiens
agagacttggttggcatcttctgct

SEQ ID NO: 15077 - DNA, 25 bp, Homo sapiens
agggtttttctagcttgtgtgacag

SEQ ID NO: 15078 - DNA, 25 bp, Homo sapiens
gcccaggtcttaattctccaagagg

SEQ ID NO: 15079 - DNA, 25 bp, Homo sapiens
ggcacatgtggctgttgtcattctt

SEQ ID NO: 15080 - DNA, 25 bp, Homo sapiens
ggtggaatgtcaggttgcctgccca

SEQ ID NO: 15081 - DNA, 25 bp, Homo sapiens
gtacctgccttaggcactattcctt

SEQ ID NO: 15082 - DNA, 25 bp, Homo sapiens
tgattgaattttttctcctgcatcc

SEQ ID NO: 15083 - DNA, 25 bp, Homo sapiens
tgttcccctccaatttatgttattt

SEQ ID NO: 15084 - DNA, 25 bp, Homo sapiens
ttgtcacttactcccttgtgattga

SEQ ID NO: 15085 - DNA, 25 bp, Homo sapiens
tttcacgtaccttaatccaatcttt

SEQ ID NO: 15086 - DNA, 25 bp, Homo sapiens
aatgctgagaaatttgccactggag

SEQ ID NO: 15087 - DNA, 25 bp, Homo sapiens
atccatttgtaagcatttatcccat

SEQ ID NO: 15088 - DNA, 25 bp, Homo sapiens
atttgggtccaacttcaataatgta

SEQ ID NO: 15089 - DNA, 25 bp, Homo sapiens
gccactggagacaagcaatctgaat

SEQ ID NO: 15090 - DNA, 25 bp, Homo sapiens
gtactatgtgactcatgcttctgga

SEQ ID NO: 15091 - DNA, 25 bp, Homo sapiens
gtatctgtaaccacaatcacacata

SEQ ID NO: 15092 - DNA, 25 bp, Homo sapiens
gttctctcacctgaggtattttttt

SEQ ID NO: 15093 - DNA, 25 bp, Homo sapiens
tatacagtttaataagcctcttgca

SEQ ID NO: 15094 - DNA, 25 bp, Homo sapiens
tgcaactagcaactcatcttcggaa

SEQ ID NO: 15095 - DNA, 25 bp, Homo sapiens
ttcctcttctccctttgcaagagga

SEQ ID NO: 15096 - DNA, 25 bp, Homo sapiens
ttgcaagttacttgttctctcacct

SEQ ID NO: 15097 - DNA, 25 bp, Homo sapiens
cacttctggagctgtgagacccaag

SEQ ID NO: 15098 - DNA, 25 bp, Homo sapiens
ccacctgacccctagggatttgtca

SEQ ID NO: 15099 - DNA, 25 bp, Homo sapiens
cgtcctggaagtgtccgggactcgc

SEQ ID NO: 15100 - DNA, 25 bp, Homo sapiens
ctgtaattgtgatgcctctgatgga

SEQ ID NO: 15101 - DNA, 25 bp, Homo sapiens
gactctaggatggcttcgttctggc

SEQ ID NO: 15102 - DNA, 25 bp, Homo sapiens
gagctgtctcaccaggagaccacgt

SEQ ID NO: 15103 - DNA, 25 bp, Homo sapiens
gagttcgtgcgggaaaaccacctga

SEQ ID NO: 15104 - DNA, 25 bp, Homo sapiens
tatctttttcagtctcctctaaaaa

SEQ ID NO: 15105 - DNA, 25 bp, Homo sapiens
tcgagactggtacccggaggagctg

SEQ ID NO: 15106 - DNA, 25 bp, Homo sapiens
ttaaaacgcagcgctctaaccctgc

SEQ ID NO: 15107 - DNA, 25 bp, Homo sapiens
ttggcaagatatttacccaccggcc

SEQ ID NO: 15108 - DNA, 25 bp, Homo sapiens
aaagcatatcactagccaaagaggg

SEQ ID NO: 15109 - DNA, 25 bp, Homo sapiens
agaatttcctcaacactaacttcac

SEQ ID NO: 15110 - DNA, 25 bp, Homo sapiens
ataccatattttattcgagtcactg

SEQ ID NO: 15111 - DNA, 25 bp, Homo sapiens
atgtggtgtgtcttccaactttcat

SEQ ID NO: 15112 - DNA, 25 bp, Homo sapiens
atttgtggtcttgatcatacctatt

SEQ ID NO: 15113 - DNA, 25 bp, Homo sapiens
gaaaatgccatatctataccatatt

SEQ ID NO: 15114 - DNA, 25 bp, Homo sapiens
gcagcagtaatcttcttttaggagc

SEQ ID NO: 15115 - DNA, 25 bp, Homo sapiens
ggagatgacttaagttggcagcagt

SEQ ID NO: 15116 - DNA, 25 bp, Homo sapiens
gtaccacagtcttgcacataagtgc

SEQ ID NO: 15117 - DNA, 25 bp, Homo sapiens
taggagcttgtaccacagtcttgca

SEQ ID NO: 15118 - DNA, 25 bp, Homo sapiens
tgttcttcttactgtgcctatatta

SEQ ID NO: 15119 - DNA, 25 bp, Homo sapiens
aaagtagttctattgacattcctca

SEQ ID NO: 15120 - DNA, 25 bp, Homo sapiens
acaaaatcttgacccagctgaacat

SEQ ID NO: 15121 - DNA, 25 bp, Homo sapiens
acccagctgaacatgtcttcctgag

SEQ ID NO: 15122 - DNA, 25 bp, Homo sapiens
catgtcttcctgagtcagtgcctga

SEQ ID NO: 15123 - DNA, 25 bp, Homo sapiens
ctagttcacacataaagtcctttta

SEQ ID NO: 15124 - DNA, 25 bp, Homo sapiens
gaagctgacacaccgtatgttgtta

SEQ ID NO: 15125 - DNA, 25 bp, Homo sapiens
gaggtaccttgctgtgtaggaggat

SEQ ID NO: 15126 - DNA, 25 bp, Homo sapiens
ggaagacttacgatgcatgtataca

SEQ ID NO: 15127 - DNA, 25 bp, Homo sapiens
gttagagtcttttatctggtcaggg

SEQ ID NO: 15128 - DNA, 25 bp, Homo sapiens
taatgttctatatagcctttgctaa

SEQ ID NO: 15129 - DNA, 25 bp, Homo sapiens
taattttcaccccaataatgttcta

SEQ ID NO: 15130 - DNA, 25 bp, Homo sapiens
aacagaagccagccgtgggcaaaat

SEQ ID NO: 15131 - DNA, 25 bp, Homo sapiens
aggggatcaaacagaagccagccgt

SEQ ID NO: 15132 - DNA, 25 bp, Homo sapiens
caagaagcaggggcctctgagtgcc

SEQ ID NO: 15133 - DNA, 25 bp, Homo sapiens
cacaggctacgtgttgagcgtggcc

SEQ ID NO: 15134 - DNA, 25 bp, Homo sapiens
cccgctactgcttacacaggccggg

SEQ ID NO: 15135 - DNA, 25 bp, Homo sapiens
gcctctgagtgccaagcgacgtggc

SEQ ID NO: 15136 - DNA, 25 bp, Homo sapiens
gcgtggcctacgtgagccaacaaga

SEQ ID NO: 15137 - DNA, 25 bp, Homo sapiens
ggttcccacgcagaggggaggctgc

SEQ ID NO: 15138 - DNA, 25 bp, Homo sapiens
gtgtggcacaggctacgtgttgagc

SEQ ID NO: 15139 - DNA, 25 bp, Homo sapiens
gtgttgagcgtggcctacgtgagcc

SEQ ID NO: 15140 - DNA, 25 bp, Homo sapiens
tgagtgccaagcgacgtggcgggct

SEQ ID NO: 15141 - DNA, 25 bp, Homo sapiens
acccttcctctgaacagtgaccaaa

SEQ ID NO: 15142 - DNA, 25 bp, Homo sapiens
aggatacactccacagacagacact

SEQ ID NO: 15143 - DNA, 25 bp, Homo sapiens
atgaattaagccttggtttgcccac

SEQ ID NO: 15144 - DNA, 25 bp, Homo sapiens
gaagtcttcaggtttcctttcaaat

SEQ ID NO: 15145 - DNA, 25 bp, Homo sapiens
gacgcaatcagcagctggtctcacc

SEQ ID NO: 15146 - DNA, 25 bp, Homo sapiens
gagcaacctggctggggatgttatc

SEQ ID NO: 15147 - DNA, 25 bp, Homo sapiens
gatctttcagattttccatctctag

SEQ ID NO: 15148 - DNA, 25 bp, Homo sapiens
gtgcagcaagcactttctcaggctg

SEQ ID NO: 15149 - DNA, 25 bp, Homo sapiens
gtttgcccactgagctcaagagaaa

SEQ ID NO: 15150 - DNA, 25 bp, Homo sapiens
tgaccaaacctttcacctgatgagc

SEQ ID NO: 15151 - DNA, 25 bp, Homo sapiens
tgatcttgaccgacccagtgaggaa

SEQ ID NO: 15152 - DNA, 25 bp, Homo sapiens
aaatctctgaactgtgtgggttttg

SEQ ID NO: 15153 - DNA, 25 bp, Homo sapiens
actgtgtttgatgtcctttattgat

SEQ ID NO: 15154 - DNA, 25 bp, Homo sapiens
atctcttaaatcttcaggtacagct

SEQ ID NO: 15155 - DNA, 25 bp, Homo sapiens
attagtgcctcatgactgtgtttga

SEQ ID NO: 15156 - DNA, 25 bp, Homo sapiens
attgatacaaagtgagcctgtgcct

SEQ ID NO: 15157 - DNA, 25 bp, Homo sapiens
gattgcttatgtcattagtgcctca

SEQ ID NO: 15158 - DNA, 25 bp, Homo sapiens
gcatagagacatctgagaccctcag

SEQ ID NO: 15159 - DNA, 25 bp, Homo sapiens
taagtgtcgagggaccatgccagca

SEQ ID NO: 15160 - DNA, 25 bp, Homo sapiens
taatgtagctactcttatttatttt

SEQ ID NO: 15161 - DNA, 25 bp, Homo sapiens
tgaacacttgctttttgtgattgct

SEQ ID NO: 15162 - DNA, 25 bp, Homo sapiens
tttcattttatcccttatatttcta

SEQ ID NO: 15163 - DNA, 25 bp, Homo sapiens
aataattcacgctcacgtcgttctt

SEQ ID NO: 15164 - DNA, 25 bp, Homo sapiens
agctttatctgctgttgttgatgca

SEQ ID NO: 15165 - DNA, 25 bp, Homo sapiens
attcaagagagatgtccacggccga

SEQ ID NO: 15166 - DNA, 25 bp, Homo sapiens
cactgcacatttctcctcaagaaaa

SEQ ID NO: 15167 - DNA, 25 bp, Homo sapiens
ctccctcttgttttagctgttacac

SEQ ID NO: 15168 - DNA, 25 bp, Homo sapiens
cttgttttgatcatttccactgcac

SEQ ID NO: 15169 - DNA, 25 bp, Homo sapiens
gaagacatgctgctatggtcactga

SEQ ID NO: 15170 - DNA, 25 bp, Homo sapiens
ggtcactgaggggttagctttatct

SEQ ID NO: 15171 - DNA, 25 bp, Homo sapiens
gtccacggccgaaacatacggtgaa

SEQ ID NO: 15172 - DNA, 25 bp, Homo sapiens
tcgttcttccacagtatcttgtttt

SEQ ID NO: 15173 - DNA, 25 bp, Homo sapiens
ttgttgatgcatccgtccaagttca

SEQ ID NO: 15174 - DNA, 25 bp, Homo sapiens
aaacagcagtggtgccatttccttc

SEQ ID NO: 15175 - DNA, 25 bp, Homo sapiens
cagccattaggcgtcagcatcttga

SEQ ID NO: 15176 - DNA, 25 bp, Homo sapiens
ccctcctaccagatgacacagacaa

SEQ ID NO: 15177 - DNA, 25 bp, Homo sapiens
cttccccatcttcatgttacaaacc

SEQ ID NO: 15178 - DNA, 25 bp, Homo sapiens
gaacaattacactggccatgccata

SEQ ID NO: 15179 - DNA, 25 bp, Homo sapiens
gaatgctgccaagagttcctcagat

SEQ ID NO: 15180 - DNA, 25 bp, Homo sapiens
gacacacactattacattcaggcca

SEQ ID NO: 15181 - DNA, 25 bp, Homo sapiens
gataatggcgttcccactggggtta

SEQ ID NO: 15182 - DNA, 25 bp, Homo sapiens
tcactcgtgtctgctctggaagata

SEQ ID NO: 15183 - DNA, 25 bp, Homo sapiens
tgagggaaccaggattcctccctcc

SEQ ID NO: 15184 - DNA, 25 bp, Homo sapiens
tgcattactatgacccttccaaaga

SEQ ID NO: 15185 - DNA, 25 bp, Homo sapiens
aggagcacttctctaatcatgccct

SEQ ID NO: 15186 - DNA, 25 bp, Homo sapiens
cacacaaatgggggcaaccacatcc

SEQ ID NO: 15187 - DNA, 25 bp, Homo sapiens
gaggcaaaggaaactgggtggggag

SEQ ID NO: 15188 - DNA, 25 bp, Homo sapiens
gagggagcttgtgctcaggagtcca

SEQ ID NO: 15189 - DNA, 25 bp, Homo sapiens
ggagtaagagccttaggtcagtttg

SEQ ID NO: 15190 - DNA, 25 bp, Homo sapiens
ggatcaattagagaggaggcacctg

SEQ ID NO: 15191 - DNA, 25 bp, Homo sapiens
gggtgtaggtttctgaggtgtgcca

SEQ ID NO: 15192 - DNA, 25 bp, Homo sapiens
tattattatttgttcttgactgtta

SEQ ID NO: 15193 - DNA, 25 bp, Homo sapiens
tccagcctcggggtgtaggtttctg

SEQ ID NO: 15194 - DNA, 25 bp, Homo sapiens
tccatcagcaaaggagcacttctct

SEQ ID NO: 15195 - DNA, 25 bp, Homo sapiens
tgaggtgtgccattggggcctcagc

SEQ ID NO: 15196 - DNA, 25 bp, Homo sapiens
acaacccagtgaagagttctaccat

SEQ ID NO: 15197 - DNA, 25 bp, Homo sapiens
acagctgatagtgattgccttgaat

SEQ ID NO: 15198 - DNA, 25 bp, Homo sapiens
attccagtagtcagtacacttttct

SEQ ID NO: 15199 - DNA, 25 bp, Homo sapiens
cctgggtgttccacagctgatagtg

SEQ ID NO: 15200 - DNA, 25 bp, Homo sapiens
ccttgtggtctgattcctttttcta

SEQ ID NO: 15201 - DNA, 25 bp, Homo sapiens
cttacttccctatatttgcagctgt

SEQ ID NO: 15202 - DNA, 25 bp, Homo sapiens
gcaaggcctaatgttagctttagct

SEQ ID NO: 15203 - DNA, 25 bp, Homo sapiens
gggagatagacctttacagcaatca

SEQ ID NO: 15204 - DNA, 25 bp, Homo sapiens
taacagtttgtgaacttacttccct

SEQ ID NO: 15205 - DNA, 25 bp, Homo sapiens
ttcctcctgtcagttgcgtgaattt

SEQ ID NO: 15206 - DNA, 25 bp, Homo sapiens
ttttgtccatatccaggttagctgg

SEQ ID NO: 15207 - DNA, 25 bp, Homo sapiens
aaaccggaggtatcttcaaaggcat

SEQ ID NO: 15208 - DNA, 25 bp, Homo sapiens
aaggctggcatgttatctccttgct

SEQ ID NO: 15209 - DNA, 25 bp, Homo sapiens
atagctctttactgtcttacttggg

SEQ ID NO: 15210 - DNA, 25 bp, Homo sapiens
atgtgtaattgttccagcattccaa

SEQ ID NO: 15211 - DNA, 25 bp, Homo sapiens
gacctggttccagtaaatgtcccac

SEQ ID NO: 15212 - DNA, 25 bp, Homo sapiens
gagaaaacgcagtttgcactttcaa

SEQ ID NO: 15213 - DNA, 25 bp, Homo sapiens
gcactttcaagacagcttctctaag

SEQ ID NO: 15214 - DNA, 25 bp, Homo sapiens
gcattccaatggtcttgtgcatagc

SEQ ID NO: 15215 - DNA, 25 bp, Homo sapiens
tacccgttcttatcctagtggttca

SEQ ID NO: 15216 - DNA, 25 bp, Homo sapiens
tagaaagcatgctcatgaccctgcc

SEQ ID NO: 15217 - DNA, 25 bp, Homo sapiens
tgtagctccaagtcttaaatggctt

SEQ ID NO: 15218 - DNA, 25 bp, Homo sapiens
ataagccatacaggccagggaccca

SEQ ID NO: 15219 - DNA, 25 bp, Homo sapiens
cagctccccagtataagccatacag

SEQ ID NO: 15220 - DNA, 25 bp, Homo sapiens
cagggtgacattcaccccagggcag

SEQ ID NO: 15221 - DNA, 25 bp, Homo sapiens
gaatttctgctggactttatctggg

SEQ ID NO: 15222 - DNA, 25 bp, Homo sapiens
gacagacgcttgaatcaggcactat

SEQ ID NO: 15223 - DNA, 25 bp, Homo sapiens
gacccttgggtttggacagcccaga

SEQ ID NO: 15224 - DNA, 25 bp, Homo sapiens
gatgggcctcatcagggtgacattc

SEQ ID NO: 15225 - DNA, 25 bp, Homo sapiens
gcaaagtgggcagaggaccccacct

SEQ ID NO: 15226 - DNA, 25 bp, Homo sapiens
gggagactagcacctaggtacccac

SEQ ID NO: 15227 - DNA, 25 bp, Homo sapiens
gtggacaagagctgatgggcctcat

SEQ ID NO: 15228 - DNA, 25 bp, Homo sapiens
ttagagcacaagtctggcctcactg

SEQ ID NO: 15229 - DNA, 25 bp, Homo sapiens
ccccctggttctgagccagtagctg

SEQ ID NO: 15230 - DNA, 25 bp, Homo sapiens
cttcagttcaacatgcttccttagc

SEQ ID NO: 15231 - DNA, 25 bp, Homo sapiens
gaatgtgaatgaagcctcccaggca

SEQ ID NO: 15232 - DNA, 25 bp, Homo sapiens
gagaacatctctgcctaatttacca

SEQ ID NO: 15233 - DNA, 25 bp, Homo sapiens
gagacagacttggcaagggaccccc

SEQ ID NO: 15234 - DNA, 25 bp, Homo sapiens
gattttacctgtttgctgctgagaa

SEQ ID NO: 15235 - DNA, 25 bp, Homo sapiens
gcttccttagcttttcatagttgtc

SEQ ID NO: 15236 - DNA, 25 bp, Homo sapiens
ggcacccgctgaatttctgaggcct

SEQ ID NO: 15237 - DNA, 25 bp, Homo sapiens
tcaggggagcgtttcttccatgaca

SEQ ID NO: 15238 - DNA, 25 bp, Homo sapiens
tcatttctcagtcctatttctcagt

SEQ ID NO: 15239 - DNA, 25 bp, Homo sapiens
ttaccaaagccagaccttcagttca

SEQ ID NO: 15240 - DNA, 25 bp, Homo sapiens
aacatcattttagcaaaggccagga

SEQ ID NO: 15241 - DNA, 25 bp, Homo sapiens
aactctctgaaatttctcaagcacc

SEQ ID NO: 15242 - DNA, 25 bp, Homo sapiens
agagttgttcatcttccttatggga

SEQ ID NO: 15243 - DNA, 25 bp, Homo sapiens
attttggtaacacttctctatattt

SEQ ID NO: 15244 - DNA, 25 bp, Homo sapiens
caccaagccgacctcagagttgttc

SEQ ID NO: 15245 - DNA, 25 bp, Homo sapiens
gagagatgacctcggaagcatttcc

SEQ ID NO: 15246 - DNA, 25 bp, Homo sapiens
gcaatgatactaaacaactctctga

SEQ ID NO: 15247 - DNA, 25 bp, Homo sapiens
gcatttccacagatggtgtcagggt

SEQ ID NO: 15248 - DNA, 25 bp, Homo sapiens
ggattttttttctgtagctcaaagg

SEQ ID NO: 15249 - DNA, 25 bp, Homo sapiens
tatgggacaaaaccggttgaccaga

SEQ ID NO: 15250 - DNA, 25 bp, Homo sapiens
tcccctggaagctttagaatattta

SEQ ID NO: 15251 - DNA, 25 bp, Homo sapiens
aacttggccctttcctgatggaaat

SEQ ID NO: 15252 - DNA, 25 bp, Homo sapiens
atatttcctccatagcagaagttgt

SEQ ID NO: 15253 - DNA, 25 bp, Homo sapiens
cacctcaaagtgtactcttggaatg

SEQ ID NO: 15254 - DNA, 25 bp, Homo sapiens
cccctgttagagaccctcatgggct

SEQ ID NO: 15255 - DNA, 25 bp, Homo sapiens
ctcatgggctaggacttttcatcta

SEQ ID NO: 15256 - DNA, 25 bp, Homo sapiens
gatagattcaagacctttacctcag

SEQ ID NO: 15257 - DNA, 25 bp, Homo sapiens
gccatcactcttttttgtgaggagc

SEQ ID NO: 15258 - DNA, 25 bp, Homo sapiens
gcctaaatacattcttcctggggtc

SEQ ID NO: 15259 - DNA, 25 bp, Homo sapiens
ggattctttcctgtaaagtcttatc

SEQ ID NO: 15260 - DNA, 25 bp, Homo sapiens
gtctgggtgccagaactcaaggttc

SEQ ID NO: 15261 - DNA, 25 bp, Homo sapiens
tccccattcaaggcagtcaagttaa

SEQ ID NO: 15262 - DNA, 25 bp, Homo sapiens
aaatcctgagtgagtctgactgaaa

SEQ ID NO: 15263 - DNA, 25 bp, Homo sapiens
aacaaatttctcgtgatgattcatt

SEQ ID NO: 15264 - DNA, 25 bp, Homo sapiens
aattcctgtgcatgttctataatct

SEQ ID NO: 15265 - DNA, 25 bp, Homo sapiens
agatgttctcagtgattcaacttta

SEQ ID NO: 15266 - DNA, 25 bp, Homo sapiens
gagaccaaagcctgtaactgtccag

SEQ ID NO: 15267 - DNA, 25 bp, Homo sapiens
gagtattagcccttgcaagttttca

SEQ ID NO: 15268 - DNA, 25 bp, Homo sapiens
gcctgtaactgtccagcttctaatt

SEQ ID NO: 15269 - DNA, 25 bp, Homo sapiens
gggtgtgtgccaagcgaaacccagg

SEQ ID NO: 15270 - DNA, 25 bp, Homo sapiens
ggtccattagggcttcgttgtgtta

SEQ ID NO: 15271 - DNA, 25 bp, Homo sapiens
gttctgccgtgactgttcaggtgta

SEQ ID NO: 15272 - DNA, 25 bp, Homo sapiens
tctataatctgacaccctgaaagca

SEQ ID NO: 15273 - DNA, 25 bp, Homo sapiens
aaagactggatccaaacccatcttc

SEQ ID NO: 15274 - DNA, 25 bp, Homo sapiens
aaaggctattgaccgagcacatacc

SEQ ID NO: 15275 - DNA, 25 bp, Homo sapiens
acccatcttcctggacctgaagttc

SEQ ID NO: 15276 - DNA, 25 bp, Homo sapiens
agcacataccatgtgccacacacct

SEQ ID NO: 15277 - DNA, 25 bp, Homo sapiens
atgtgccaggtcttaggatgtgtct

SEQ ID NO: 15278 - DNA, 25 bp, Homo sapiens
attactaccagagccgttactacac

SEQ ID NO: 15279 - DNA, 25 bp, Homo sapiens
cacagtacccggtgactcttgggga

SEQ ID NO: 15280 - DNA, 25 bp, Homo sapiens
gacatgacccgagtaactttctgct

SEQ ID NO: 15281 - DNA, 25 bp, Homo sapiens
gctgatgaacaaatctgcaccccac

SEQ ID NO: 15282 - DNA, 25 bp, Homo sapiens
taccatctctccagctagcaaaatt

SEQ ID NO: 15283 - DNA, 25 bp, Homo sapiens
tgtcacgggaccagtattgtttacc

SEQ ID NO: 15284 - DNA, 25 bp, Homo sapiens
agaagaggctgcggacctatcgttg

SEQ ID NO: 15285 - DNA, 25 bp, Homo sapiens
gaccttccctaagccgctggaagat

SEQ ID NO: 15286 - DNA, 25 bp, Homo sapiens
gactcaccctgttccacatagaaca

SEQ ID NO: 15287 - DNA, 25 bp, Homo sapiens
gaggtcaagtacagtctcctcatga

SEQ ID NO: 15288 - DNA, 25 bp, Homo sapiens
ggaaaaattgtcccgtctgtcactt

SEQ ID NO: 15289 - DNA, 25 bp, Homo sapiens
ggcaagctgcacttcggaattgatc

SEQ ID NO: 15290 - DNA, 25 bp, Homo sapiens
ggggcgggttctgaagcgatgagag

SEQ ID NO: 15291 - DNA, 25 bp, Homo sapiens
gggtggcaaagtggacctccacctc

SEQ ID NO: 15292 - DNA, 25 bp, Homo sapiens
gtggcctcatcgtggttagcaaaac

SEQ ID NO: 15293 - DNA, 25 bp, Homo sapiens
tgacgatactactatcaccgacctt

SEQ ID NO: 15294 - DNA, 25 bp, Homo sapiens
tgtcacttgttttgttgccttaata

SEQ ID NO: 15295 - DNA, 25 bp, Homo sapiens
aaattgcaccccaaatatggctgga

SEQ ID NO: 15296 - DNA, 25 bp, Homo sapiens
cattcccctcagctaatgacggagt

SEQ ID NO: 15297 - DNA, 25 bp, Homo sapiens
ccatagatctggatctggccctgct

SEQ ID NO: 15298 - DNA, 25 bp, Homo sapiens
ccctgctgcttctcagacagcattg

SEQ ID NO: 15299 - DNA, 25 bp, Homo sapiens
ctagaatgtgttattgcccctgttc

SEQ ID NO: 15300 - DNA, 25 bp, Homo sapiens
ggtgctcaggaggatggttgtgtag

SEQ ID NO: 15301 - DNA, 25 bp, Homo sapiens
taatgacggagtgctccttctccag

SEQ ID NO: 15302 - DNA, 25 bp, Homo sapiens
tagtcatggaggacccctggatcct

SEQ ID NO: 15303 - DNA, 25 bp, Homo sapiens
tatggctggaatgccacttcccttt

SEQ ID NO: 15304 - DNA, 25 bp, Homo sapiens
tcaagccccgggctagcttttgaaa

SEQ ID NO: 15305 - DNA, 25 bp, Homo sapiens
ttgccattttgtcctttgattatat

SEQ ID NO: 15306 - DNA, 25 bp, Homo sapiens
atcttgcaagcaaatcccatttctt

SEQ ID NO: 15307 - DNA, 25 bp, Homo sapiens
catgctcagtgccttttggtttcac

SEQ ID NO: 15308 - DNA, 25 bp, Homo sapiens
ccctttgttaccatactgtctctgg

SEQ ID NO: 15309 - DNA, 25 bp, Homo sapiens
gaaaagccttggagaactcggtttg

SEQ ID NO: 15310 - DNA, 25 bp, Homo sapiens
gaactcggtttggtagacttggaca

SEQ ID NO: 15311 - DNA, 25 bp, Homo sapiens
gacatctctctggcttctgaagagc

SEQ ID NO: 15312 - DNA, 25 bp, Homo sapiens
gacccaggtgggacttagcagtgag

SEQ ID NO: 15313 - DNA, 25 bp, Homo sapiens
ggaagacttgggttgatctcttaga

SEQ ID NO: 15314 - DNA, 25 bp, Homo sapiens
tccctcattcatcttgcaagcaaat

SEQ ID NO: 15315 - DNA, 25 bp, Homo sapiens
ttggtagacttggacatctctctgg

SEQ ID NO: 15316 - DNA, 25 bp, Homo sapiens
tttatcaaatttgccatgacatttc

SEQ ID NO: 15317 - DNA, 25 bp, Homo sapiens
aatgcatctggctactttttcatgt

SEQ ID NO: 15318 - DNA, 25 bp, Homo sapiens
acaagactttaccatacacgcaact

SEQ ID NO: 15319 - DNA, 25 bp, Homo sapiens
actggcattactcagcaggagcccc

SEQ ID NO: 15320 - DNA, 25 bp, Homo sapiens
agaaactaatccttactatcctatt

SEQ ID NO: 15321 - DNA, 25 bp, Homo sapiens
attaggataccacttttcattgcaa

SEQ ID NO: 15322 - DNA, 25 bp, Homo sapiens
caagttcaagggctctttctccctg

SEQ ID NO: 15323 - DNA, 25 bp, Homo sapiens
ctgcatcagttcactgctgcatgtt

SEQ ID NO: 15324 - DNA, 25 bp, Homo sapiens
gaaacactttctcacttacagggga

SEQ ID NO: 15325 - DNA, 25 bp, Homo sapiens
ggatttcacggagacagcaaccaga

SEQ ID NO: 15326 - DNA, 25 bp, Homo sapiens
tggcttctctttacagctttgtttc

SEQ ID NO: 15327 - DNA, 25 bp, Homo sapiens
ttcatatgtccccactggcattact

SEQ ID NO: 15328 - DNA, 25 bp, Homo sapiens
aaccctgatggttttcggtgatcca

SEQ ID NO: 15329 - DNA, 25 bp, Homo sapiens
gagggggaatatttgctgggcgtca

SEQ ID NO: 15330 - DNA, 25 bp, Homo sapiens
gatcacccatgattctgtttcactg

SEQ ID NO: 15331 - DNA, 25 bp, Homo sapiens
gggtagattcacttgtgtgcacttg

SEQ ID NO: 15332 - DNA, 25 bp, Homo sapiens
gtcctctagagcatgtgtactggca

SEQ ID NO: 15333 - DNA, 25 bp, Homo sapiens
gtgcaattcgatcctcaatcagtgg

SEQ ID NO: 15334 - DNA, 25 bp, Homo sapiens
gtgcacttgtacagttgtagctgcg

SEQ ID NO: 15335 - DNA, 25 bp, Homo sapiens
taaatgtttattcttctcagctttc

SEQ ID NO: 15336 - DNA, 25 bp, Homo sapiens
tagctgcgagtccagaagtcctcta

SEQ ID NO: 15337 - DNA, 25 bp, Homo sapiens
tgcagagccctttcatgttaattag

SEQ ID NO: 15338 - DNA, 25 bp, Homo sapiens
tgctttctcctgtcatggttaagag

SEQ ID NO: 15339 - DNA, 25 bp, Homo sapiens
aaagcttttgttcacacacactctg

SEQ ID NO: 15340 - DNA, 25 bp, Homo sapiens
agcatcaaggtccctgaccaaggct

SEQ ID NO: 15341 - DNA, 25 bp, Homo sapiens
caggttgtaccaaggtccctgagcc

SEQ ID NO: 15342 - DNA, 25 bp, Homo sapiens
ccaggttgtaccaaggtccctgagc

SEQ ID NO: 15343 - DNA, 25 bp, Homo sapiens
cctgagccaggtgccatcaaagttc

SEQ ID NO: 15344 - DNA, 25 bp, Homo sapiens
gaccaaggcttcatcaagtttcctg

SEQ ID NO: 15345 - DNA, 25 bp, Homo sapiens
ggtccctgagccaggttgtaccaag

SEQ ID NO: 15346 - DNA, 25 bp, Homo sapiens
ggtgccatcaaagttcctgagcaag

SEQ ID NO: 15347 - DNA, 25 bp, Homo sapiens
taatttggtgcacagacaagccctt

SEQ ID NO: 15348 - DNA, 25 bp, Homo sapiens
tacaccaaagttcctgtgccaggct

SEQ ID NO: 15349 - DNA, 25 bp, Homo sapiens
tctgaagaatcctgtaagcccctga

SEQ ID NO: 15350 - DNA, 25 bp, Homo sapiens
aatgaggactctctacaggacccga

SEQ ID NO: 15351 - DNA, 25 bp, Homo sapiens
acaggacccgatatggcatccctgg

SEQ ID NO: 15352 - DNA, 25 bp, Homo sapiens
gaaggagagccatgcgtactttcta

SEQ ID NO: 15353 - DNA, 25 bp, Homo sapiens
gaatgttgtccctgaacttagctaa

SEQ ID NO: 15354 - DNA, 25 bp, Homo sapiens
ggcatgtgtgactgtttcagcgact

SEQ ID NO: 15355 - DNA, 25 bp, Homo sapiens
gttcttcaccatcttttgcaactga

SEQ ID NO: 15356 - DNA, 25 bp, Homo sapiens
gtttctccttgctttcatattatcg

SEQ ID NO: 15357 - DNA, 25 bp, Homo sapiens
tatatggcaactctttgctgtcctc

SEQ ID NO: 15358 - DNA, 25 bp, Homo sapiens
tcctcattgtactctttgccaaatc

SEQ ID NO: 15359 - DNA, 25 bp, Homo sapiens
tctctgtggcacattttgtttcccg

SEQ ID NO: 15360 - DNA, 25 bp, Homo sapiens
ttcagcgactgcggagtctgtctct

SEQ ID NO: 15361 - DNA, 25 bp, Homo sapiens
aaaagtttagcccctgaaagccatg

SEQ ID NO: 15362 - DNA, 25 bp, Homo sapiens
aaacatctcatcagtatccagtggt

SEQ ID NO: 15363 - DNA, 25 bp, Homo sapiens
aaagagaaacacgtatcccacctga

SEQ ID NO: 15364 - DNA, 25 bp, Homo sapiens
agagaatgcccttctccttattgta

SEQ ID NO: 15365 - DNA, 25 bp, Homo sapiens
gctgtctgaggctaggtgggttgaa

SEQ ID NO: 15366 - DNA, 25 bp, Homo sapiens
ggagtcactgagaccaaggctttct

SEQ ID NO: 15367 - DNA, 25 bp, Homo sapiens
ggctatgtcctaataatatcccact

SEQ ID NO: 15368 - DNA, 25 bp, Homo sapiens
gtctctaccactgctgatattttct

SEQ ID NO: 15369 - DNA, 25 bp, Homo sapiens
tattgtaaccctgtctggatcctat

SEQ ID NO: 15370 - DNA, 25 bp, Homo sapiens
tccttctgagcccggtaagagcaaa

SEQ ID NO: 15371 - DNA, 25 bp, Homo sapiens
tctctactgattccgcagctcagac

SEQ ID NO: 15372 - DNA, 25 bp, Homo sapiens
aaatgctcagagttctttatgtatt

SEQ ID NO: 15373 - DNA, 25 bp, Homo sapiens
acgtatggactggataactctgaga

SEQ ID NO: 15374 - DNA, 25 bp, Homo sapiens
agagctggtttggggctatagcata

SEQ ID NO: 15375 - DNA, 25 bp, Homo sapiens
attaccttatcatgtcttagagccc

SEQ ID NO: 15376 - DNA, 25 bp, Homo sapiens
attctacaccaaattgtctcttcaa

SEQ ID NO: 15377 - DNA, 25 bp, Homo sapiens
attgccacttcaactctaaggaata

SEQ ID NO: 15378 - DNA, 25 bp, Homo sapiens
gaccttgcttggaagagcctggaca

SEQ ID NO: 15379 - DNA, 25 bp, Homo sapiens
gcctggacactaacaattctacacc

SEQ ID NO: 15380 - DNA, 25 bp, Homo sapiens
gtaactcgcattttaatgatccgct

SEQ ID NO: 15381 - DNA, 25 bp, Homo sapiens
gtcttagagcccgtctttatgttta

SEQ ID NO: 15382 - DNA, 25 bp, Homo sapiens
tatccctttggaagaccttgcttgg

SEQ ID NO: 15383 - DNA, 25 bp, Homo sapiens
aaacctcagtcattgactcttcaat

SEQ ID NO: 15384 - DNA, 25 bp, Homo sapiens
aaagcttgtacagacactcatgtag

SEQ ID NO: 15385 - DNA, 25 bp, Homo sapiens
acaggaatcctgtgcattatactaa

SEQ ID NO: 15386 - DNA, 25 bp, Homo sapiens
atctcttcaaactgtctaaactgtg

SEQ ID NO: 15387 - DNA, 25 bp, Homo sapiens
ctctcctcgtgcttcaaaatgacag

SEQ ID NO: 15388 - DNA, 25 bp, Homo sapiens
gaaggctcctaaatttgagttgttt

SEQ ID NO: 15389 - DNA, 25 bp, Homo sapiens
gaatctgtttcactcaatggattgt

SEQ ID NO: 15390 - DNA, 25 bp, Homo sapiens
gagttgtttgctaatcatttcattt

SEQ ID NO: 15391 - DNA, 25 bp, Homo sapiens
gatgacttcagaaatcctacttcag

SEQ ID NO: 15392 - DNA, 25 bp, Homo sapiens
tagcaacacgtttaaatctcttcaa

SEQ ID NO: 15393 - DNA, 25 bp, Homo sapiens
tcatttgcatcattagggtatcctt

SEQ ID NO: 15394 - DNA, 25 bp, Homo sapiens
ccgctgatccgatgccaagagaacg

SEQ ID NO: 15395 - DNA, 25 bp, Homo sapiens
ctagggggcaaggccttgaacactg

SEQ ID NO: 15396 - DNA, 25 bp, Homo sapiens
gacaatggagtgacgtgccctgcaa

SEQ ID NO: 15397 - DNA, 25 bp, Homo sapiens
gacagctacttcctgtctggagaga

SEQ ID NO: 15398 - DNA, 25 bp, Homo sapiens
gagaactgcgtggtcatggtgtggc

SEQ ID NO: 15399 - DNA, 25 bp, Homo sapiens
gctgcgctatgaggtggacactgtg

SEQ ID NO: 15400 - DNA, 25 bp, Homo sapiens
ggaccatcgaaggcgacttcttgtg

SEQ ID NO: 15401 - DNA, 25 bp, Homo sapiens
ggacgctggaaggcgctgttgatcc

SEQ ID NO: 15402 - DNA, 25 bp, Homo sapiens
ggacgtcaggggaggctactgggac

SEQ ID NO: 15403 - DNA, 25 bp, Homo sapiens
tccccctgctctatgagaactggaa

SEQ ID NO: 15404 - DNA, 25 bp, Homo sapiens
tgagaactggaaccctgggcagcct

SEQ ID NO: 15405 - DNA, 25 bp, Homo sapiens
catctccaccatgaactctgttaag

SEQ ID NO: 15406 - DNA, 25 bp, Homo sapiens
ccctgtcttctgcataatcatgcct

SEQ ID NO: 15407 - DNA, 25 bp, Homo sapiens
gaatcagatgtctccattacttcca

SEQ ID NO: 15408 - DNA, 25 bp, Homo sapiens
gcagcatacctggctctttgctgat

SEQ ID NO: 15409 - DNA, 25 bp, Homo sapiens
gcctgtgccttatcttttggtggag

SEQ ID NO: 15410 - DNA, 25 bp, Homo sapiens
gtatggtgatcttgaaacctccaga

SEQ ID NO: 15411 - DNA, 25 bp, Homo sapiens
gtgaagccaaatcgtaacttacagc

SEQ ID NO: 15412 - DNA, 25 bp, Homo sapiens
tacagcaagcagcatgcagcatacc

SEQ ID NO: 15413 - DNA, 25 bp, Homo sapiens
tcatgccttcttgctaagtaattca

SEQ ID NO: 15414 - DNA, 25 bp, Homo sapiens
tgattggacaaacgggcctgtgcct

SEQ ID NO: 15415 - DNA, 25 bp, Homo sapiens
ttgtctacactcaggctgcagtatt

SEQ ID NO: 15416 - DNA, 25 bp, Homo sapiens
aagtggctgttctgggagtcattcc

SEQ ID NO: 15417 - DNA, 25 bp, Homo sapiens
agacaaggtctgggttgggcgtctg

SEQ ID NO: 15418 - DNA, 25 bp, Homo sapiens
cccagaaggaaccgcagctcgcgag

SEQ ID NO: 15419 - DNA, 25 bp, Homo sapiens
cctgtctctggaggtctgcaagcac

SEQ ID NO: 15420 - DNA, 25 bp, Homo sapiens
gaaggagcactgggctaggggtcag

SEQ ID NO: 15421 - DNA, 25 bp, Homo sapiens
gacatccgcagattcttgtcagcct

SEQ ID NO: 15422 - DNA, 25 bp, Homo sapiens
ggcaaggaagcaggtggatccccca

SEQ ID NO: 15423 - DNA, 25 bp, Homo sapiens
gtagctgccttgcgaggtggtgaga

SEQ ID NO: 15424 - DNA, 25 bp, Homo sapiens
tcctcagcttcctccatcatggagg

SEQ ID NO: 15425 - DNA, 25 bp, Homo sapiens
tctgtcacctcattggtccatgaag

SEQ ID NO: 15426 - DNA, 25 bp, Homo sapiens
tgtcagcctgtgaactaggccctgc

SEQ ID NO: 15427 - DNA, 25 bp, Homo sapiens
acagacctcggggattgcactaaac

SEQ ID NO: 15428 - DNA, 25 bp, Homo sapiens
aggacacagctcaaagcttttttgt

SEQ ID NO: 15429 - DNA, 25 bp, Homo sapiens
cctctgggacttccgtaggaacaag

SEQ ID NO: 15430 - DNA, 25 bp, Homo sapiens
ctccgcgcaatcacatactgtatat

SEQ ID NO: 15431 - DNA, 25 bp, Homo sapiens
gagggtcgtgttgactccatatgaa

SEQ ID NO: 15432 - DNA, 25 bp, Homo sapiens
gccaaagatacctgctgaattctcg

SEQ ID NO: 15433 - DNA, 25 bp, Homo sapiens
gtaggaacaagggctgcggcccacc

SEQ ID NO: 15434 - DNA, 25 bp, Homo sapiens
taaaatcacagctgtcgtcctagcc

SEQ ID NO: 15435 - DNA, 25 bp, Homo sapiens
tcggggattgcactaaaccctcgtt

SEQ ID NO: 15436 - DNA, 25 bp, Homo sapiens
tgaattctcgcgtttcaggaaacaa

SEQ ID NO: 15437 - DNA, 25 bp, Homo sapiens
tgtcgtcctagccagtgggggcgac

SEQ ID NO: 15438 - DNA, 25 bp, Homo sapiens
ataaactagccttctcaaaatccca

SEQ ID NO: 15439 - DNA, 25 bp, Homo sapiens
attctggattccactcacagggaga

SEQ ID NO: 15440 - DNA, 25 bp, Homo sapiens
ccagcccagagtttactgacttgta

SEQ ID NO: 15441 - DNA, 25 bp, Homo sapiens
gacggtccaaatctcataaactagc

SEQ ID NO: 15442 - DNA, 25 bp, Homo sapiens
gcttgaactcatgagacggtccaaa

SEQ ID NO: 15443 - DNA, 25 bp, Homo sapiens
ggagatgggattcctttcttgtcca

SEQ ID NO: 15444 - DNA, 25 bp, Homo sapiens
ggcctggagccacactctatatggc

SEQ ID NO: 15445 - DNA, 25 bp, Homo sapiens
ggtgaagggtgtttgcttgaactca

SEQ ID NO: 15446 - DNA, 25 bp, Homo sapiens
tgacttgtaattctctatccaggac

SEQ ID NO: 15447 - DNA, 25 bp, Homo sapiens
tgtcttggtagcaccagccagtgtt

SEQ ID NO: 15448 - DNA, 25 bp, Homo sapiens
tttgcttctctttcgacatgaaatg

SEQ ID NO: 15449 - DNA, 25 bp, Homo sapiens
aaaacacttctaattctgtgattaa

SEQ ID NO: 15450 - DNA, 25 bp, Homo sapiens
aaacagaagcctatttggaagccat

SEQ ID NO: 15451 - DNA, 25 bp, Homo sapiens
aatcaggaatatgttgctttggaaa

SEQ ID NO: 15452 - DNA, 25 bp, Homo sapiens
catcaagcgcatttatagcagcctg

SEQ ID NO: 15453 - DNA, 25 bp, Homo sapiens
ccaggagtctttcaactgtttcaga

SEQ ID NO: 15454 - DNA, 25 bp, Homo sapiens
gaatccttatttcctcatagcttat

SEQ ID NO: 15455 - DNA, 25 bp, Homo sapiens
gatgataactccaacccaggaggaa

SEQ ID NO: 15456 - DNA, 25 bp, Homo sapiens
gctttcttcccgtaaaaactatctg

SEQ ID NO: 15457 - DNA, 25 bp, Homo sapiens
ggaagaagccgaggccatcaagcgc

SEQ ID NO: 15458 - DNA, 25 bp, Homo sapiens
gtggagaaaggcatccttgacaagg

SEQ ID NO: 15459 - DNA, 25 bp, Homo sapiens
tgacccaagggttattagaaagtgc

SEQ ID NO: 15460 - DNA, 25 bp, Homo sapiens
accttacaaatgactcagcccacgt

SEQ ID NO: 15461 - DNA, 25 bp, Homo sapiens
caaggctctgtttgatgtcctggcc

SEQ ID NO: 15462 - DNA, 25 bp, Homo sapiens
cgccttcacctccaggtcaaagaag

SEQ ID NO: 15463 - DNA, 25 bp, Homo sapiens
gacgactgtggggactatctggtga

SEQ ID NO: 15464 - DNA, 25 bp, Homo sapiens
gagtcccgagagatgtttccaagat

SEQ ID NO: 15465 - DNA, 25 bp, Homo sapiens
gcaggctctatgcatctgagaacca

SEQ ID NO: 15466 - DNA, 25 bp, Homo sapiens
gttccaggtcccatacgtgacatat

SEQ ID NO: 15467 - DNA, 25 bp, Homo sapiens
tcgttcatccgattgctacgttcca

SEQ ID NO: 15468 - DNA, 25 bp, Homo sapiens
tgcggaaaacctcttcatccaattc

SEQ ID NO: 15469 - DNA, 25 bp, Homo sapiens
tgctacgttccaaagtgtccaggtt

SEQ ID NO: 15470 - DNA, 25 bp, Homo sapiens
ttccttctgcatgtcagcacagtcg

SEQ ID NO: 15471 - DNA, 25 bp, Homo sapiens
aagatcacaagcctgccacgatggc

SEQ ID NO: 15472 - DNA, 25 bp, Homo sapiens
gagaccttaaaggcttcctatccca

SEQ ID NO: 15473 - DNA, 25 bp, Homo sapiens
gagcgagggcagtcccagtgagaac

SEQ ID NO: 15474 - DNA, 25 bp, Homo sapiens
gatcctgaagcttactatgcagcct

SEQ ID NO: 15475 - DNA, 25 bp, Homo sapiens
gattacaatgctctcagtgtctgcc

SEQ ID NO: 15476 - DNA, 25 bp, Homo sapiens
gcctttaaccttttctgcagtgatc

SEQ ID NO: 15477 - DNA, 25 bp, Homo sapiens
gcgatggtacctgtggcaagagcga

SEQ ID NO: 15478 - DNA, 25 bp, Homo sapiens
tatgcagcctacaaacagccttagt

SEQ ID NO: 15479 - DNA, 25 bp, Homo sapiens
tgaaggatgccactgctttctgtgc

SEQ ID NO: 15480 - DNA, 25 bp, Homo sapiens
tgtagcccacccatgagaagcaaga

SEQ ID NO: 15481 - DNA, 25 bp, Homo sapiens
ttctgtgcagaacttctccatgtca

SEQ ID NO: 15482 - DNA, 25 bp, Homo sapiens
aaaccattgcattcttgtacactga

SEQ ID NO: 15483 - DNA, 25 bp, Homo sapiens
aaagtttgaagcttcatccaccaaa

SEQ ID NO: 15484 - DNA, 25 bp, Homo sapiens
atattggtcattgatcttcgttcat

SEQ ID NO: 15485 - DNA, 25 bp, Homo sapiens
attctgtccgtgtaactataaattt

SEQ ID NO: 15486 - DNA, 25 bp, Homo sapiens
gaaatgctgtaaatatgtcccaatt

SEQ ID NO: 15487 - DNA, 25 bp, Homo sapiens
gaagcttcatccaccaaagttaaat

SEQ ID NO: 15488 - DNA, 25 bp, Homo sapiens
gataaactaaaattctgtccgtgta

SEQ ID NO: 15489 - DNA, 25 bp, Homo sapiens
gatcttcgttcatgaattagtctac

SEQ ID NO: 15490 - DNA, 25 bp, Homo sapiens
gggggagaattccaggtgccttaat

SEQ ID NO: 15491 - DNA, 25 bp, Homo sapiens
gtcccaatttgtattgattctcttt

SEQ ID NO: 15492 - DNA, 25 bp, Homo sapiens
ttatgtttgacctaaatgggctaaa

SEQ ID NO: 15493 - DNA, 25 bp, Homo sapiens
aagccttctttttcactaggccagg

SEQ ID NO: 15494 - DNA, 25 bp, Homo sapiens
aaggaaatcgtcgtcaacccatgtg

SEQ ID NO: 15495 - DNA, 25 bp, Homo sapiens
acatggtgagctcttgaggacccct

SEQ ID NO: 15496 - DNA, 25 bp, Homo sapiens
caaggccgttaagttccagtcctgg

SEQ ID NO: 15497 - DNA, 25 bp, Homo sapiens
ccacctctgcctcgatacagatatg

SEQ ID NO: 15498 - DNA, 25 bp, Homo sapiens
gacaaatcccacatgttctcaaggc

SEQ ID NO: 15499 - DNA, 25 bp, Homo sapiens
gacccctgccagaagcagcaagggc

SEQ ID NO: 15500 - DNA, 25 bp, Homo sapiens
gccagtcattccctgattggtatct

SEQ ID NO: 15501 - DNA, 25 bp, Homo sapiens
ggtgcttccctggaccagaacagac

SEQ ID NO: 15502 - DNA, 25 bp, Homo sapiens
tgtgagtcctcactcatgagccagc

SEQ ID NO: 15503 - DNA, 25 bp, Homo sapiens
ttcccacatcgagcacatagcatcc

SEQ ID NO: 15504 - DNA, 25 bp, Homo sapiens
aaaaagcttatctttgccttctcca

SEQ ID NO: 15505 - DNA, 25 bp, Homo sapiens
acatgtgacaatttagagattcttt

SEQ ID NO: 15506 - DNA, 25 bp, Homo sapiens
attaccagtgtgatacataggaatc

SEQ ID NO: 15507 - DNA, 25 bp, Homo sapiens
cactgattaatatactgtggcaaat

SEQ ID NO: 15508 - DNA, 25 bp, Homo sapiens
gaagactctttttgacactaaacac

SEQ ID NO: 15509 - DNA, 25 bp, Homo sapiens
gaatgtagtctggtctttaggaagt

SEQ ID NO: 15510 - DNA, 25 bp, Homo sapiens
gcaatagtctccaagtcaatataaa

SEQ ID NO: 15511 - DNA, 25 bp, Homo sapiens
gtcctgggcttatattacacatata

SEQ ID NO: 15512 - DNA, 25 bp, Homo sapiens
taaagctttactattctgtcctggg

SEQ ID NO: 15513 - DNA, 25 bp, Homo sapiens
tttgcacataacttagttgattcag

SEQ ID NO: 15514 - DNA, 25 bp, Homo sapiens
tttgccttctccaaacaagaagcaa

SEQ ID NO: 15515 - DNA, 25 bp, Homo sapiens
aaccctctcatttacactgtggcat

SEQ ID NO: 15516 - DNA, 25 bp, Homo sapiens
ccttggcttatatctcttcaccatt

SEQ ID NO: 15517 - DNA, 25 bp, Homo sapiens
gaagtcaggctcacttggacagccc

SEQ ID NO: 15518 - DNA, 25 bp, Homo sapiens
gaatgattgggggttccaaaccact

SEQ ID NO: 15519 - DNA, 25 bp, Homo sapiens
gaccgagaggatagactgctgttgc

SEQ ID NO: 15520 - DNA, 25 bp, Homo sapiens
gaggcagctgccttggaagggaagt

SEQ ID NO: 15521 - DNA, 25 bp, Homo sapiens
gcaggaagaatcccttcctcttggg

SEQ ID NO: 15522 - DNA, 25 bp, Homo sapiens
ggcaggtagagcagttctgaccgag

SEQ ID NO: 15523 - DNA, 25 bp, Homo sapiens
tggacctcatctactcagcgagaat

SEQ ID NO: 15524 - DNA, 25 bp, Homo sapiens
tggggtccttgatgggcatgtgtga

SEQ ID NO: 15525 - DNA, 25 bp, Homo sapiens
tttggtggtcaactgtgggcctacc

SEQ ID NO: 15526 - DNA, 25 bp, Homo sapiens
aaaggctgcagtatgtctatattct

SEQ ID NO: 15527 - DNA, 25 bp, Homo sapiens
aagacatactgcagtttgttcataa

SEQ ID NO: 15528 - DNA, 25 bp, Homo sapiens
aatggccactctgcatttgcaaggc

SEQ ID NO: 15529 - DNA, 25 bp, Homo sapiens
actaaacagtggattcctctcgtgt

SEQ ID NO: 15530 - DNA, 25 bp, Homo sapiens
atgtgttgagcagcctatgaaccta

SEQ ID NO: 15531 - DNA, 25 bp, Homo sapiens
atttctcagtattttaaccagtgtg

SEQ ID NO: 15532 - DNA, 25 bp, Homo sapiens
cttgtagccctatagttctgtgact

SEQ ID NO: 15533 - DNA, 25 bp, Homo sapiens
gactttgtgtggttcgaatttctca

SEQ ID NO: 15534 - DNA, 25 bp, Homo sapiens
gtgacttcatttgctatacgcttta

SEQ ID NO: 15535 - DNA, 25 bp, Homo sapiens
tattcttgctgtactcattggtagt

SEQ ID NO: 15536 - DNA, 25 bp, Homo sapiens
tttgcaaggcccggtggttgacatc

SEQ ID NO: 15537 - DNA, 25 bp, Homo sapiens
aaagagtaaggcatgtccctgccca

SEQ ID NO: 15538 - DNA, 25 bp, Homo sapiens
aaatgctatgaacggccctttctta

SEQ ID NO: 15539 - DNA, 25 bp, Homo sapiens
aaatttcctgagcgaaacactccaa

SEQ ID NO: 15540 - DNA, 25 bp, Homo sapiens
cagatgtcatcttggaattggtttc

SEQ ID NO: 15541 - DNA, 25 bp, Homo sapiens
gtccgctgtgtatgttagctgaact

SEQ ID NO: 15542 - DNA, 25 bp, Homo sapiens
tagagggtttgtgccaaatgctatg

SEQ ID NO: 15543 - DNA, 25 bp, Homo sapiens
tatgaacggccctttcttaaagaca

SEQ ID NO: 15544 - DNA, 25 bp, Homo sapiens
tccctgcccagaaacttaggaagca

SEQ ID NO: 15545 - DNA, 25 bp, Homo sapiens
ttgatgtgtccgctgtgtatgttag

SEQ ID NO: 15546 - DNA, 25 bp, Homo sapiens
ttttgtcccttaatcaaactcaaat

SEQ ID NO: 15547 - DNA, 25 bp, Homo sapiens
tttttcctcatacatctccaaattg

SEQ ID NO: 15548 - DNA, 25 bp, Homo sapiens
agccagctacttcgcataagacctg

SEQ ID NO: 15549 - DNA, 25 bp, Homo sapiens
aggccccgctgatgcaagatggcag

SEQ ID NO: 15550 - DNA, 25 bp, Homo sapiens
atgcttcgacttagctcgaggcctg

SEQ ID NO: 15551 - DNA, 25 bp, Homo sapiens
attagagccccgagaattcctcttc

SEQ ID NO: 15552 - DNA, 25 bp, Homo sapiens
cggtgaggacacttgggtccctgac

SEQ ID NO: 15553 - DNA, 25 bp, Homo sapiens
gaagcaaacagtgtcccttctggct

SEQ ID NO: 15554 - DNA, 25 bp, Homo sapiens
gcagatctgatacccattagagccc

SEQ ID NO: 15555 - DNA, 25 bp, Homo sapiens
ggagctacagatgctatgtccacag

SEQ ID NO: 15556 - DNA, 25 bp, Homo sapiens
ggcagagaacttctccactgccacg

SEQ ID NO: 15557 - DNA, 25 bp, Homo sapiens
gtcaagaatctgttcagtccctctc

SEQ ID NO: 15558 - DNA, 25 bp, Homo sapiens
tgctggggataagcccttaggcacc

SEQ ID NO: 15559 - DNA, 25 bp, Homo sapiens
agctctttggaatcgtgaacacagg

SEQ ID NO: 15560 - DNA, 25 bp, Homo sapiens
agctgaccaaaatcctgcagggcca

SEQ ID NO: 15561 - DNA, 25 bp, Homo sapiens
attttcttccaagatgacctccatt

SEQ ID NO: 15562 - DNA, 25 bp, Homo sapiens
cacaggtgtgctatattgtccttgt

SEQ ID NO: 15563 - DNA, 25 bp, Homo sapiens
cagtcggcactgttatttgcttctt

SEQ ID NO: 15564 - DNA, 25 bp, Homo sapiens
cctccattctcggcagacctaagag

SEQ ID NO: 15565 - DNA, 25 bp, Homo sapiens
gagttgcctctgagttagctctttg

SEQ ID NO: 15566 - DNA, 25 bp, Homo sapiens
gccatggcctgaatgttggcttaac

SEQ ID NO: 15567 - DNA, 25 bp, Homo sapiens
ggctcctctatacatgctatacatg

SEQ ID NO: 15568 - DNA, 25 bp, Homo sapiens
ttctgttagctctctttgactcaag

SEQ ID NO: 15569 - DNA, 25 bp, Homo sapiens
ttgccctggtgtctttttccagatt

SEQ ID NO: 15570 - DNA, 25 bp, Homo sapiens
aactcgtggcactaacttggaaaag

SEQ ID NO: 15571 - DNA, 25 bp, Homo sapiens
ccacccagtgacgactacgatgaca

SEQ ID NO: 15572 - DNA, 25 bp, Homo sapiens
gaatccaagcgctttgtgcagtggc

SEQ ID NO: 15573 - DNA, 25 bp, Homo sapiens
gatctcaactcgtggcactaacttg

SEQ ID NO: 15574 - DNA, 25 bp, Homo sapiens
gcagtggcagtcgtctatctgagcc

SEQ ID NO: 15575 - DNA, 25 bp, Homo sapiens
ggcagactagggagtagggctggca

SEQ ID NO: 15576 - DNA, 25 bp, Homo sapiens
ggtcccatccttggagggactaagc

SEQ ID NO: 15577 - DNA, 25 bp, Homo sapiens
tcaaccctcaggaatccaagcgctt

SEQ ID NO: 15578 - DNA, 25 bp, Homo sapiens
tcttggccatggacagcctgcacag

SEQ ID NO: 15579 - DNA, 25 bp, Homo sapiens
tgacacagacgatgacgaccctttc

SEQ ID NO: 15580 - DNA, 25 bp, Homo sapiens
tggccatggacagcctgcacaggac

SEQ ID NO: 15581 - DNA, 25 bp, Homo sapiens
atgtgtataagattcctcctaccac

SEQ ID NO: 15582 - DNA, 25 bp, Homo sapiens
ccatgatcatggtttactgcgcgtc

SEQ ID NO: 15583 - DNA, 25 bp, Homo sapiens
ctcctggctggtggattcctgagta

SEQ ID NO: 15584 - DNA, 25 bp, Homo sapiens
ctgaggtcatttgtaccctaggccc

SEQ ID NO: 15585 - DNA, 25 bp, Homo sapiens
gaacccacgagaatgtcctctgact

SEQ ID NO: 15586 - DNA, 25 bp, Homo sapiens
gacccctggctccaatgagaattct

SEQ ID NO: 15587 - DNA, 25 bp, Homo sapiens
gatatcatcagggttccggtgttca

SEQ ID NO: 15588 - DNA, 25 bp, Homo sapiens
tatcagtgtgtgatctaccagcctc

SEQ ID NO: 15589 - DNA, 25 bp, Homo sapiens
tctataccagccccagaactgtgac

SEQ ID NO: 15590 - DNA, 25 bp, Homo sapiens
ttactgcgcgtccgaatggtcaacc

SEQ ID NO: 15591 - DNA, 25 bp, Homo sapiens
tttgctgtcacgctgaggtcatttg

SEQ ID NO: 15592 - DNA, 25 bp, Homo sapiens
aaggacagagacgctggctaggccg

SEQ ID NO: 15593 - DNA, 25 bp, Homo sapiens
aaggagctttggttcggagacaggc

SEQ ID NO: 15594 - DNA, 25 bp, Homo sapiens
caccatctgcagccttgaaggagct

SEQ ID NO: 15595 - DNA, 25 bp, Homo sapiens
ccagaccgtgactgactatggcaag

SEQ ID NO: 15596 - DNA, 25 bp, Homo sapiens
ctgttaccaacatgaagctgctcgc

SEQ ID NO: 15597 - DNA, 25 bp, Homo sapiens
gaagctgctcgcagcaactgtgcta

SEQ ID NO: 15598 - DNA, 25 bp, Homo sapiens
gagctttggttcggagacaggcaaa

SEQ ID NO: 15599 - DNA, 25 bp, Homo sapiens
gcacagacaccaaggacagagacgc

SEQ ID NO: 15600 - DNA, 25 bp, Homo sapiens
gcctggtttctcagtacttccagac

SEQ ID NO: 15601 - DNA, 25 bp, Homo sapiens
gtacttccagaccgtgactgactat

SEQ ID NO: 15602 - DNA, 25 bp, Homo sapiens
tctcagtacttccagaccgtgactg

SEQ ID NO: 15603 - DNA, 25 bp, Homo sapiens
acttcttgagctatttcgtggaact

SEQ ID NO: 15604 - DNA, 25 bp, Homo sapiens
agtgtccagaccattgtcttccaac

SEQ ID NO: 15605 - DNA, 25 bp, Homo sapiens
atttcgtggaacttggaacacagcc

SEQ ID NO: 15606 - DNA, 25 bp, Homo sapiens
ccacccagtgaagtgtccagaccat

SEQ ID NO: 15607 - DNA, 25 bp, Homo sapiens
cgaggccaagtcttactttgaaaag

SEQ ID NO: 15608 - DNA, 25 bp, Homo sapiens
gaagtgtccagaccattgtcttcca

SEQ ID NO: 15609 - DNA, 25 bp, Homo sapiens
gctggaacggaactggttaacttct

SEQ ID NO: 15610 - DNA, 25 bp, Homo sapiens
ggaactggttaacttcttgagctat

SEQ ID NO: 15611 - DNA, 25 bp, Homo sapiens
ggttaacttcttgagctatttcgtg

SEQ ID NO: 15612 - DNA, 25 bp, Homo sapiens
tcaaaggagcagctgacacccctga

SEQ ID NO: 15613 - DNA, 25 bp, Homo sapiens
tcaagaaggctggaacggaactggt

SEQ ID NO: 15614 - DNA, 25 bp, Homo sapiens
aaccatcacctgttggccaacaagt

SEQ ID NO: 15615 - DNA, 25 bp, Homo sapiens
agggctttgcaattcgtggcatcct

SEQ ID NO: 15616 - DNA, 25 bp, Homo sapiens
atggggctggggacttgaattggat

SEQ ID NO: 15617 - DNA, 25 bp, Homo sapiens
cttttccattctgtggagctgccgt

SEQ ID NO: 15618 - DNA, 25 bp, Homo sapiens
gacacactatgagagcgttgctacc

SEQ ID NO: 15619 - DNA, 25 bp, Homo sapiens
gagctgccgttcctaataattccag

SEQ ID NO: 15620 - DNA, 25 bp, Homo sapiens
gcgttgctacctgtggggcaagagc

SEQ ID NO: 15621 - DNA, 25 bp, Homo sapiens
ggccatctatgggactgaactttga

SEQ ID NO: 15622 - DNA, 25 bp, Homo sapiens
gggtaagtagatcttttgccttgca

SEQ ID NO: 15623 - DNA, 25 bp, Homo sapiens
tgaatgcctgctggtagcttttcca

SEQ ID NO: 15624 - DNA, 25 bp, Homo sapiens
ttgccttgcaaattgctgcctgggt

SEQ ID NO: 15625 - DNA, 25 bp, Homo sapiens
acacgctgcagatcgaggactttct

SEQ ID NO: 15626 - DNA, 25 bp, Homo sapiens
acgccaagacagacacgctgcagat

SEQ ID NO: 15627 - DNA, 25 bp, Homo sapiens
agacacgctgcagatcgaggacttt

SEQ ID NO: 15628 - DNA, 25 bp, Homo sapiens
caagttctccgcgttcatcaagaac

SEQ ID NO: 15629 - DNA, 25 bp, Homo sapiens
cgaggactttctggaggagacgctg

SEQ ID NO: 15630 - DNA, 25 bp, Homo sapiens
gcaacgacgttttccacaagttctc

SEQ ID NO: 15631 - DNA, 25 bp, Homo sapiens
gcctcgttacagggagtccaacacc

SEQ ID NO: 15632 - DNA, 25 bp, Homo sapiens
gctgcagatcgaggactttctggag

SEQ ID NO: 15633 - DNA, 25 bp, Homo sapiens
tccgcgttcatcaagaacccggtgc

SEQ ID NO: 15634 - DNA, 25 bp, Homo sapiens
tcgttacagggagtccaacaccgcc

SEQ ID NO: 15635 - DNA, 25 bp, Homo sapiens
ttctccgcgttcatcaagaacccgg

SEQ ID NO: 15636 - DNA, 25 bp, Homo sapiens
aacattctgtactggttcccaagag

SEQ ID NO: 15637 - DNA, 25 bp, Homo sapiens
atctaagaggattcaacacctttgt

SEQ ID NO: 15638 - DNA, 25 bp, Homo sapiens
atgtcaaagctgcatgtgtaggatg

SEQ ID NO: 15639 - DNA, 25 bp, Homo sapiens
atgtgtaggatgtatgctgtttgta

SEQ ID NO: 15640 - DNA, 25 bp, Homo sapiens
ccccaaaggcatgcagtcatgagaa

SEQ ID NO: 15641 - DNA, 25 bp, Homo sapiens
gatttgtaaatctttgtgaacattc

SEQ ID NO: 15642 - DNA, 25 bp, Homo sapiens
gggatgttgcaaagggattactaga

SEQ ID NO: 15643 - DNA, 25 bp, Homo sapiens
gtatcatgttttactacataggtta

SEQ ID NO: 15644 - DNA, 25 bp, Homo sapiens
gtatctcaacaacatgtcaaagctg

SEQ ID NO: 15645 - DNA, 25 bp, Homo sapiens
tccctgctacctgatttcagcacaa

SEQ ID NO: 15646 - DNA, 25 bp, Homo sapiens
ttcccaagagctattcattccctgc

SEQ ID NO: 15647 - DNA, 25 bp, Homo sapiens
aaagtgggcatccaagccgggttct

SEQ ID NO: 15648 - DNA, 25 bp, Homo sapiens
aacctgagctctcccaggagacaac

SEQ ID NO: 15649 - DNA, 25 bp, Homo sapiens
agggggtctgcctgagaatggagaa

SEQ ID NO: 15650 - DNA, 25 bp, Homo sapiens
gacctagctagggatgcaagagtga

SEQ ID NO: 15651 - DNA, 25 bp, Homo sapiens
gagctggtgctgacctagctaggga

SEQ ID NO: 15652 - DNA, 25 bp, Homo sapiens
gcaggtgaggagcaggctccacaga

SEQ ID NO: 15653 - DNA, 25 bp, Homo sapiens
gctacaaagtgggcatccaagccgg

SEQ ID NO: 15654 - DNA, 25 bp, Homo sapiens
ggagacaacttagctgccagtcacc

SEQ ID NO: 15655 - DNA, 25 bp, Homo sapiens
ggtgctgacctagctagggatgcaa

SEQ ID NO: 15656 - DNA, 25 bp, Homo sapiens
tccaagccgggttctggctgcagaa

SEQ ID NO: 15657 - DNA, 25 bp, Homo sapiens
tgaggagcaggctccacagactctc

SEQ ID NO: 15658 - DNA, 25 bp, Homo sapiens
aattgtgcgctctgtagatttggat

SEQ ID NO: 15659 - DNA, 25 bp, Homo sapiens
acatactttgacaaccccagtgagt

SEQ ID NO: 15660 - DNA, 25 bp, Homo sapiens
acctacatctagtttcatttcatct

SEQ ID NO: 15661 - DNA, 25 bp, Homo sapiens
attttgttgtgctatgagcctctgt

SEQ ID NO: 15662 - DNA, 25 bp, Homo sapiens
ccgctgatgtttgccttgtcaatat

SEQ ID NO: 15663 - DNA, 25 bp, Homo sapiens
gaataggggcatcagtgtcccgtga

SEQ ID NO: 15664 - DNA, 25 bp, Homo sapiens
gagcctctgtaatcaaatgcttgta

SEQ ID NO: 15665 - DNA, 25 bp, Homo sapiens
gattgtttttagtcttgcttgagga

SEQ ID NO: 15666 - DNA, 25 bp, Homo sapiens
gattttacagcagcaattacttggc

SEQ ID NO: 15667 - DNA, 25 bp, Homo sapiens
gcacgtatgcaatcttttattcctc

SEQ ID NO: 15668 - DNA, 25 bp, Homo sapiens
ttttagcttgttttacctacatcta

SEQ ID NO: 15669 - DNA, 25 bp, Homo sapiens
aaacatgtaatactccagcagggat

SEQ ID NO: 15670 - DNA, 25 bp, Homo sapiens
aagtcctacgtcaagctagctttgc

SEQ ID NO: 15671 - DNA, 25 bp, Homo sapiens
atcccccatgtcccaaaggtggaat

SEQ ID NO: 15672 - DNA, 25 bp, Homo sapiens
ccaataccccaccgtgatgacttga

SEQ ID NO: 15673 - DNA, 25 bp, Homo sapiens
gagatttatccgagacgcgattatt

SEQ ID NO: 15674 - DNA, 25 bp, Homo sapiens
gagtctttggagtcggggatggagg

SEQ ID NO: 15675 - DNA, 25 bp, Homo sapiens
gcagtaccgtagccaatgagattta

SEQ ID NO: 15676 - DNA, 25 bp, Homo sapiens
gcctctgaattgtagaacctgcatt

SEQ ID NO: 15677 - DNA, 25 bp, Homo sapiens
gtggaatacaaccagaggtctcatc

SEQ ID NO: 15678 - DNA, 25 bp, Homo sapiens
tacatgaccatcaaagtcctacgtc

SEQ ID NO: 15679 - DNA, 25 bp, Homo sapiens
tgaactttcttgcgtactgattaca

SEQ ID NO: 15680 - DNA, 25 bp, Homo sapiens
aatgcagtgggacggacctggggtg

SEQ ID NO: 15681 - DNA, 25 bp, Homo sapiens
agccctgaagcctgcgtgtggaggg

SEQ ID NO: 15682 - DNA, 25 bp, Homo sapiens
aggtggtggtgggcactgtgagaac

SEQ ID NO: 15683 - DNA, 25 bp, Homo sapiens
cacaccacccaagcctagctgggtg

SEQ ID NO: 15684 - DNA, 25 bp, Homo sapiens
caccacctgagtctaaccagcgtat

SEQ ID NO: 15685 - DNA, 25 bp, Homo sapiens
ccgggcctgagtggaggctgagtct

SEQ ID NO: 15686 - DNA, 25 bp, Homo sapiens
gagtctaaccagcgtataatgcaat

SEQ ID NO: 15687 - DNA, 25 bp, Homo sapiens
gctgggtgggaagacggagccctga

SEQ ID NO: 15688 - DNA, 25 bp, Homo sapiens
ggcactgtgagaacgtggcctgccc

SEQ ID NO: 15689 - DNA, 25 bp, Homo sapiens
ggtctgcctgggcgaatgcagtggg

SEQ ID NO: 15690 - DNA, 25 bp, Homo sapiens
ttccccagcttgtgctccaggggag

SEQ ID NO: 15691 - DNA, 25 bp, Homo sapiens
acaagctgacctgacaagtactatg

SEQ ID NO: 15692 - DNA, 25 bp, Homo sapiens
ccctggcccaatacctatgtatgca

SEQ ID NO: 15693 - DNA, 25 bp, Homo sapiens
ctatgtatgcaatgctcctcagccc

SEQ ID NO: 15694 - DNA, 25 bp, Homo sapiens
gacgggctggcaaatgccttgcagg

SEQ ID NO: 15695 - DNA, 25 bp, Homo sapiens
gcaagccatttacagaaacccactc

SEQ ID NO: 15696 - DNA, 25 bp, Homo sapiens
ggatgctggcatcttagaaccctcc

SEQ ID NO: 15697 - DNA, 25 bp, Homo sapiens
gtagaggctggacccatggcaagcc

SEQ ID NO: 15698 - DNA, 25 bp, Homo sapiens
gtcaccatgtgtgggctcagggacc

SEQ ID NO: 15699 - DNA, 25 bp, Homo sapiens
taacaccacaactaatttcacccaa

SEQ ID NO: 15700 - DNA, 25 bp, Homo sapiens
tgttccaggtggccatagtcagtca

SEQ ID NO: 15701 - DNA, 25 bp, Homo sapiens
ttaagcacgttctttcatcagaccc

SEQ ID NO: 15702 - DNA, 25 bp, Homo sapiens
aaagcatctactcctaatggttatg

SEQ ID NO: 15703 - DNA, 25 bp, Homo sapiens
cttcgctggtggggatgctggagat

SEQ ID NO: 15704 - DNA, 25 bp, Homo sapiens
gacaagtttttcacatcccataatg

SEQ ID NO: 15705 - DNA, 25 bp, Homo sapiens
gatggctttgattttggcgatgatc

SEQ ID NO: 15706 - DNA, 25 bp, Homo sapiens
gctggagatgcctttgatggctttg

SEQ ID NO: 15707 - DNA, 25 bp, Homo sapiens
ggagtttattaccaaggtggcactt

SEQ ID NO: 15708 - DNA, 25 bp, Homo sapiens
ggcatgcagttcagtacctgggaca

SEQ ID NO: 15709 - DNA, 25 bp, Homo sapiens
ggcgatgatcctagtgacaagtttt

SEQ ID NO: 15710 - DNA, 25 bp, Homo sapiens
ggtggatgaacaagtgtcacgctgg

SEQ ID NO: 15711 - DNA, 25 bp, Homo sapiens
ggtggcacttactcaaaagcatcta

SEQ ID NO: 15712 - DNA, 25 bp, Homo sapiens
tcacgctggccatctcaatggagtt

SEQ ID NO: 15713 - DNA, 25 bp, Homo sapiens
cacacatgatcctgaccgtcggaaa

SEQ ID NO: 15714 - DNA, 25 bp, Homo sapiens
cagaccgtgtctaggttggggctcg

SEQ ID NO: 15715 - DNA, 25 bp, Homo sapiens
cctccttctttgtgtggaatctgca

SEQ ID NO: 15716 - DNA, 25 bp, Homo sapiens
ctcgttgcaatcgcctttgcagtca

SEQ ID NO: 15717 - DNA, 25 bp, Homo sapiens
gccaaggttggagctcagaccgtgt

SEQ ID NO: 15718 - DNA, 25 bp, Homo sapiens
gccagtttcaggtccagtgagcatg

SEQ ID NO: 15719 - DNA, 25 bp, Homo sapiens
gggatggatgtccagtgctaccacc

SEQ ID NO: 15720 - DNA, 25 bp, Homo sapiens
tactcttcgatggcggccagtttca

SEQ ID NO: 15721 - DNA, 25 bp, Homo sapiens
tctgcaatagtgggctgactccctc

SEQ ID NO: 15722 - DNA, 25 bp, Homo sapiens
tttgcagtcaaccacttctggtgcc

SEQ ID NO: 15723 - DNA, 25 bp, Homo sapiens
aaatatgtggttgctctttatccct

SEQ ID NO: 15724 - DNA, 25 bp, Homo sapiens
aactttgccatattgaggcctttat

SEQ ID NO: 15725 - DNA, 25 bp, Homo sapiens
aatatagtcattttgcctatgtttc

SEQ ID NO: 15726 - DNA, 25 bp, Homo sapiens
actacctatttctaaactttgccat

SEQ ID NO: 15727 - DNA, 25 bp, Homo sapiens
agtgcaattttgcttgaacaatgtt

SEQ ID NO: 15728 - DNA, 25 bp, Homo sapiens
atgtgcatgcatactacctatttct

SEQ ID NO: 15729 - DNA, 25 bp, Homo sapiens
gaagactttttgttgtactatgtgc

SEQ ID NO: 15730 - DNA, 25 bp, Homo sapiens
gatagacatgactgacttttagctg

SEQ ID NO: 15731 - DNA, 25 bp, Homo sapiens
tattcacaagttttggagggctttt

SEQ ID NO: 15732 - DNA, 25 bp, Homo sapiens
ttatccctttgtacaagcattaaaa

SEQ ID NO: 15733 - DNA, 25 bp, Homo sapiens
tttttgttcctctgatagacatgac

SEQ ID NO: 15734 - DNA, 25 bp, Homo sapiens
acatgctctcaagattagcccatag

SEQ ID NO: 15735 - DNA, 25 bp, Homo sapiens
ataggtaagctcttccgtgtgaaag

SEQ ID NO: 15736 - DNA, 25 bp, Homo sapiens
cgcaccccgtgtataatccagtgtt

SEQ ID NO: 15737 - DNA, 25 bp, Homo sapiens
ctgcgaactcacttccaatgggatt

SEQ ID NO: 15738 - DNA, 25 bp, Homo sapiens
gacaatctcgggctctagttgcctt

SEQ ID NO: 15739 - DNA, 25 bp, Homo sapiens
gggattggagtctgttgtattctta

SEQ ID NO: 15740 - DNA, 25 bp, Homo sapiens
gtcgggcgcaaagtgtcaggtggct

SEQ ID NO: 15741 - DNA, 25 bp, Homo sapiens
taacctctgaggaacacctcggctc

SEQ ID NO: 15742 - DNA, 25 bp, Homo sapiens
tacacccaggctggcgcattttcaa

SEQ ID NO: 15743 - DNA, 25 bp, Homo sapiens
tagcccataggcagttcttgtgacc

SEQ ID NO: 15744 - DNA, 25 bp, Homo sapiens
tatccaaataaccctgcccaggaaa

SEQ ID NO: 15745 - DNA, 25 bp, Homo sapiens
actcaccataatgcctttgtaattc

SEQ ID NO: 15746 - DNA, 25 bp, Homo sapiens
atactcttttgagactggcctcttt

SEQ ID NO: 15747 - DNA, 25 bp, Homo sapiens
ccaggcagattgggacagctggtca

SEQ ID NO: 15748 - DNA, 25 bp, Homo sapiens
ccccatcagtcccaggcagattggg

SEQ ID NO: 15749 - DNA, 25 bp, Homo sapiens
gatgtgatttctaccaaatccagtt

SEQ ID NO: 15750 - DNA, 25 bp, Homo sapiens
gctggtcaccttacgcaagagccag

SEQ ID NO: 15751 - DNA, 25 bp, Homo sapiens
gttttggtcctactaaatatactct

SEQ ID NO: 15752 - DNA, 25 bp, Homo sapiens
tcaccttacgcaagagccaggctga

SEQ ID NO: 15753 - DNA, 25 bp, Homo sapiens
tcatgtacatgttttaccaccaccc

SEQ ID NO: 15754 - DNA, 25 bp, Homo sapiens
tggcctcttttactcaccataatgc

SEQ ID NO: 15755 - DNA, 25 bp, Homo sapiens
ttagcactgaaagtctcttgcccca

SEQ ID NO: 15756 - DNA, 25 bp, Homo sapiens
agtatcaactttttaaacacatcta

SEQ ID NO: 15757 - DNA, 25 bp, Homo sapiens
ccctccgatttgtgaagcctacagg

SEQ ID NO: 15758 - DNA, 25 bp, Homo sapiens
gaatttcagcgtttggcagctcaat

SEQ ID NO: 15759 - DNA, 25 bp, Homo sapiens
gagtgttccacagttgtatgtcaaa

SEQ ID NO: 15760 - DNA, 25 bp, Homo sapiens
ggaaaacagccaactacaccattag

SEQ ID NO: 15761 - DNA, 25 bp, Homo sapiens
ggcagctcaatctggactctatgaa

SEQ ID NO: 15762 - DNA, 25 bp, Homo sapiens
gggttcgaccaacattcagcaaata

SEQ ID NO: 15763 - DNA, 25 bp, Homo sapiens
taacgtttactggtactgctttcta

SEQ ID NO: 15764 - DNA, 25 bp, Homo sapiens
tgactcttgcacattctatgtaccc

SEQ ID NO: 15765 - DNA, 25 bp, Homo sapiens
tgctttctaaatactgttttacccg

SEQ ID NO: 15766 - DNA, 25 bp, Homo sapiens
ttatttatcctttgactcttgcaca

SEQ ID NO: 15767 - DNA, 25 bp, Homo sapiens
agcaggctgttaatttcccatctat

SEQ ID NO: 15768 - DNA, 25 bp, Homo sapiens
aggtgtgtgctttcaagtaggtggt

SEQ ID NO: 15769 - DNA, 25 bp, Homo sapiens
atgcagcgttatgtggatcattatg

SEQ ID NO: 15770 - DNA, 25 bp, Homo sapiens
atttcccatctatgaatagcacttt

SEQ ID NO: 15771 - DNA, 25 bp, Homo sapiens
cattctatctaaattgtgtgtctgt

SEQ ID NO: 15772 - DNA, 25 bp, Homo sapiens
ggaatgcttttgacatgttttaaca

SEQ ID NO: 15773 - DNA, 25 bp, Homo sapiens
gtgtgtctgtttttgaaaggtgtgt

SEQ ID NO: 15774 - DNA, 25 bp, Homo sapiens
tatgcattgtagcagtaatcattta

SEQ ID NO: 15775 - DNA, 25 bp, Homo sapiens
ttaatggaaatctgttactcaggct

SEQ ID NO: 15776 - DNA, 25 bp, Homo sapiens
ttagctttttaccctcaactcaagt

SEQ ID NO: 15777 - DNA, 25 bp, Homo sapiens
ttgtggttgatactcaagccttgta

SEQ ID NO: 15778 - DNA, 25 bp, Homo sapiens
acaacggaggagtttctcctctgct

SEQ ID NO: 15779 - DNA, 25 bp, Homo sapiens
aggatggttactagtggctgggaaa

SEQ ID NO: 15780 - DNA, 25 bp, Homo sapiens
gagaacaggtgtgagttttccaaaa

SEQ ID NO: 15781 - DNA, 25 bp, Homo sapiens
gatagcacaaccgggtgagtatagt

SEQ ID NO: 15782 - DNA, 25 bp, Homo sapiens
ggggcagttaaggagtcatggatgg

SEQ ID NO: 15783 - DNA, 25 bp, Homo sapiens
gtgtgcgaggggaactggggatgct

SEQ ID NO: 15784 - DNA, 25 bp, Homo sapiens
tagtgtcaaaaattcaggggcagtt

SEQ ID NO: 15785 - DNA, 25 bp, Homo sapiens
tcccttggtgtaggaacaacggagg

SEQ ID NO: 15786 - DNA, 25 bp, Homo sapiens
tgtactatgttatgcacacattaca

SEQ ID NO: 15787 - DNA, 25 bp, Homo sapiens
tgttctcaattatttgcgggatcta

SEQ ID NO: 15788 - DNA, 25 bp, Homo sapiens
tttctcctctgctaactattcatat

SEQ ID NO: 15789 - DNA, 25 bp, Homo sapiens
aaagggcttattgactctttctatt

SEQ ID NO: 15790 - DNA, 25 bp, Homo sapiens
aggatcattcaaaagttacccaaag

SEQ ID NO: 15791 - DNA, 25 bp, Homo sapiens
caaaagaactaagaggcccagccct

SEQ ID NO: 15792 - DNA, 25 bp, Homo sapiens
caccaatagtctctctgcaagacag

SEQ ID NO: 15793 - DNA, 25 bp, Homo sapiens
cagtgctacattttgtggcttttta

SEQ ID NO: 15794 - DNA, 25 bp, Homo sapiens
ctttgtctagtgtattctcttcaca

SEQ ID NO: 15795 - DNA, 25 bp, Homo sapiens
gagtggtttctgcgtgtgtatattt

SEQ ID NO: 15796 - DNA, 25 bp, Homo sapiens
gatatttttcatgctccactatttt

SEQ ID NO: 15797 - DNA, 25 bp, Homo sapiens
ggaagcactaggttggcagagacac

SEQ ID NO: 15798 - DNA, 25 bp, Homo sapiens
tagactctggccttcaccaatagtc

SEQ ID NO: 15799 - DNA, 25 bp, Homo sapiens
tcagaaacccttcagtgctacattt

SEQ ID NO: 15800 - DNA, 25 bp, Homo sapiens
aatatgtccccaaagctgaacagta

SEQ ID NO: 15801 - DNA, 25 bp, Homo sapiens
atggcaatgtgcctaacgattttga

SEQ ID NO: 15802 - DNA, 25 bp, Homo sapiens
atttcttactttatcttcatttttg

SEQ ID NO: 15803 - DNA, 25 bp, Homo sapiens
cctgaatgcctgagactctagcaga

SEQ ID NO: 15804 - DNA, 25 bp, Homo sapiens
cttcatttttggcacctcacagaac

SEQ ID NO: 15805 - DNA, 25 bp, Homo sapiens
gaatgcgttttagttcttcaccttt

SEQ ID NO: 15806 - DNA, 25 bp, Homo sapiens
gagggtgtggttttgaggagggata

SEQ ID NO: 15807 - DNA, 25 bp, Homo sapiens
gatgattgtgaacctcctgaatgcc

SEQ ID NO: 15808 - DNA, 25 bp, Homo sapiens
ggacctgcagtcaatctatcggaaa

SEQ ID NO: 15809 - DNA, 25 bp, Homo sapiens
tctcttccttctagttggctgtatt

SEQ ID NO: 15810 - DNA, 25 bp, Homo sapiens
ttcccaagctacttcctacagtatt

SEQ ID NO: 15811 - DNA, 25 bp, Homo sapiens
aaggcatccagtgctaggagtagaa

SEQ ID NO: 15812 - DNA, 25 bp, Homo sapiens
acctacagcttcacaggaggggaga

SEQ ID NO: 15813 - DNA, 25 bp, Homo sapiens
aggtctgggctttgaggaggatgga

SEQ ID NO: 15814 - DNA, 25 bp, Homo sapiens
ataaaaatcccaaatggtgtgccta

SEQ ID NO: 15815 - DNA, 25 bp, Homo sapiens
cctcctcaccctagagacggaagat

SEQ ID NO: 15816 - DNA, 25 bp, Homo sapiens
ctgtaaaatgaacagtccccctctc

SEQ ID NO: 15817 - DNA, 25 bp, Homo sapiens
gaaggaagggcaactgcattccagc

SEQ ID NO: 15818 - DNA, 25 bp, Homo sapiens
ggagcagcctcattatgtggggaag

SEQ ID NO: 15819 - DNA, 25 bp, Homo sapiens
ggtggggtctggggcttatgaaata

SEQ ID NO: 15820 - DNA, 25 bp, Homo sapiens
tacatgtttcaaagggtgaccattt

SEQ ID NO: 15821 - DNA, 25 bp, Homo sapiens
taggagtagaagtgtctccagctct

SEQ ID NO: 15822 - DNA, 25 bp, Homo sapiens
actacattttggtgctatttaaggt

SEQ ID NO: 15823 - DNA, 25 bp, Homo sapiens
ataggtgacttttgcaattcaggga

SEQ ID NO: 15824 - DNA, 25 bp, Homo sapiens
atcccacttactttaatgcgaactt

SEQ ID NO: 15825 - DNA, 25 bp, Homo sapiens
atttacatcaaatcccacttacttt

SEQ ID NO: 15826 - DNA, 25 bp, Homo sapiens
gagtgcttggcatattgtagggtgc

SEQ ID NO: 15827 - DNA, 25 bp, Homo sapiens
gattgttaattcctcagttatacca

SEQ ID NO: 15828 - DNA, 25 bp, Homo sapiens
ggtgtgcaattttctataggtgact

SEQ ID NO: 15829 - DNA, 25 bp, Homo sapiens
gttacatgcattctaccactacatt

SEQ ID NO: 15830 - DNA, 25 bp, Homo sapiens
taaaagtttttgtcactatcttcac

SEQ ID NO: 15831 - DNA, 25 bp, Homo sapiens
tattactcagattccacagtggcaa

SEQ ID NO: 15832 - DNA, 25 bp, Homo sapiens
ttgtagggtgctcaatggtggtttt

SEQ ID NO: 15833 - DNA, 25 bp, Homo sapiens
agatatactccatagtgaagcaatc

SEQ ID NO: 15834 - DNA, 25 bp, Homo sapiens
aggctggtggtggcatgatgagtgt

SEQ ID NO: 15835 - DNA, 25 bp, Homo sapiens
cgaaaccaactatacgctacatcta

SEQ ID NO: 15836 - DNA, 25 bp, Homo sapiens
gaattttggttgggcctagagaaga

SEQ ID NO: 15837 - DNA, 25 bp, Homo sapiens
gacacttcaactgtccagagggtta

SEQ ID NO: 15838 - DNA, 25 bp, Homo sapiens
gattactggcaatgtccccaatgca

SEQ ID NO: 15839 - DNA, 25 bp, Homo sapiens
gctacatctagttgcgattactggc

SEQ ID NO: 15840 - DNA, 25 bp, Homo sapiens
gggaggcttgatggagaattttggt

SEQ ID NO: 15841 - DNA, 25 bp, Homo sapiens
taaacattaacctcattccaagtta

SEQ ID NO: 15842 - DNA, 25 bp, Homo sapiens
tccccaatgcaatcccggaaaacaa

SEQ ID NO: 15843 - DNA, 25 bp, Homo sapiens
ttggtgttttctacttgggatcaca

SEQ ID NO: 15844 - DNA, 25 bp, Homo sapiens
acccaatctgagtcttatcgttgta

SEQ ID NO: 15845 - DNA, 25 bp, Homo sapiens
aggacagtttgcatgggctgagtta

SEQ ID NO: 15846 - DNA, 25 bp, Homo sapiens
ataactccttagagaccaatgtctg

SEQ ID NO: 15847 - DNA, 25 bp, Homo sapiens
atctgagtcttatcgttgtactgat

SEQ ID NO: 15848 - DNA, 25 bp, Homo sapiens
gaagaattctatacctcaggatttc

SEQ ID NO: 15849 - DNA, 25 bp, Homo sapiens
gagaccaatgtctgtagcaggtgta

SEQ ID NO: 15850 - DNA, 25 bp, Homo sapiens
gagattcactagagaataactcctt

SEQ ID NO: 15851 - DNA, 25 bp, Homo sapiens
gagttataccagctagaccaggaat

SEQ ID NO: 15852 - DNA, 25 bp, Homo sapiens
gatagaagggtcagatatccccaca

SEQ ID NO: 15853 - DNA, 25 bp, Homo sapiens
gtagcaggtgtacagcatcttgtga

SEQ ID NO: 15854 - DNA, 25 bp, Homo sapiens
gtcagatatccccacatggagttga

SEQ ID NO: 15855 - DNA, 25 bp, Homo sapiens
attggcaccagacagattccttagt

SEQ ID NO: 15856 - DNA, 25 bp, Homo sapiens
gataggacctcaatgattcccttag

SEQ ID NO: 15857 - DNA, 25 bp, Homo sapiens
gatgccatctcgggttgaaatctcc

SEQ ID NO: 15858 - DNA, 25 bp, Homo sapiens
gatggtaaccgtgtgttccaagcac

SEQ ID NO: 15859 - DNA, 25 bp, Homo sapiens
gcatcttgccgccatgattggcacc

SEQ ID NO: 15860 - DNA, 25 bp, Homo sapiens
ggccatgtggcatcattgagcagca

SEQ ID NO: 15861 - DNA, 25 bp, Homo sapiens
gtcaaactgagcttcatgtccacat

SEQ ID NO: 15862 - DNA, 25 bp, Homo sapiens
tccacttcctgcgtttaactgggtg

SEQ ID NO: 15863 - DNA, 25 bp, Homo sapiens
tgaaatctccctggtcaaggctgac

SEQ ID NO: 15864 - DNA, 25 bp, Homo sapiens
tggagcagagctctgtcttcttgat

SEQ ID NO: 15865 - DNA, 25 bp, Homo sapiens
tgtatatggccagattccacttcct

SEQ ID NO: 15866 - DNA, 25 bp, Homo sapiens
agcactcggttttggtggagctgac

SEQ ID NO: 15867 - DNA, 25 bp, Homo sapiens
agcagagcttaatcttcctaggact

SEQ ID NO: 15868 - DNA, 25 bp, Homo sapiens
atcagatttttgcctagcactcggt

SEQ ID NO: 15869 - DNA, 25 bp, Homo sapiens
ctttctcctgttattgctgcaatgt

SEQ ID NO: 15870 - DNA, 25 bp, Homo sapiens
gaatgtgcctatgtgaccagctcac

SEQ ID NO: 15871 - DNA, 25 bp, Homo sapiens
gagtttccagaccaccagtatgaat

SEQ ID NO: 15872 - DNA, 25 bp, Homo sapiens
ggactgaggtcttagcacatgtact

SEQ ID NO: 15873 - DNA, 25 bp, Homo sapiens
tacgaggttcctagagctctgctga

SEQ ID NO: 15874 - DNA, 25 bp, Homo sapiens
tgacccttggccgaaactctaaaat

SEQ ID NO: 15875 - DNA, 25 bp, Homo sapiens
tgtaccagccagtcagcgttgttta

SEQ ID NO: 15876 - DNA, 25 bp, Homo sapiens
tttggacctttccaatgcgtctctt

SEQ ID NO: 15877 - DNA, 25 bp, Homo sapiens
aacaagtggcgcagcggtgagccca

SEQ ID NO: 15878 - DNA, 25 bp, Homo sapiens
agaaggagggcgccttcgtgtactc

SEQ ID NO: 15879 - DNA, 25 bp, Homo sapiens
ccacaccaccatgtacttcatgtgt

SEQ ID NO: 15880 - DNA, 25 bp, Homo sapiens
ccccatgcggaccttcaacaagtgg

SEQ ID NO: 15881 - DNA, 25 bp, Homo sapiens
gctcttccataaagcttgtgccttt

SEQ ID NO: 15882 - DNA, 25 bp, Homo sapiens
gtttcattacctgtattgtagcccc

SEQ ID NO: 15883 - DNA, 25 bp, Homo sapiens
tattacccagaattgctcttccata

SEQ ID NO: 15884 - DNA, 25 bp, Homo sapiens
tgaaagtgttcctggggtgctgtct

SEQ ID NO: 15885 - DNA, 25 bp, Homo sapiens
tgcctacgacgaggaggactgcgtg

SEQ ID NO: 15886 - DNA, 25 bp, Homo sapiens
tgtcttcatcggcatcaacgacctg

SEQ ID NO: 15887 - DNA, 25 bp, Homo sapiens
ttgtgcctttgtccaagctatacaa

SEQ ID NO: 15888 - DNA, 25 bp, Homo sapiens
aaagatccacagagctggccattcc

SEQ ID NO: 15889 - DNA, 25 bp, Homo sapiens
agatctgtggttctctgttttgtgt

SEQ ID NO: 15890 - DNA, 25 bp, Homo sapiens
aggtgtagcagagatctcgctcctg

SEQ ID NO: 15891 - DNA, 25 bp, Homo sapiens
cccctccccgctaataggtgtagca

SEQ ID NO: 15892 - DNA, 25 bp, Homo sapiens
gaagcgctcgcagagtgtgagtggg

SEQ ID NO: 15893 - DNA, 25 bp, Homo sapiens
gaagctatccatctcatttctggta

SEQ ID NO: 15894 - DNA, 25 bp, Homo sapiens
gggacatttttgttcctggtgtttg

SEQ ID NO: 15895 - DNA, 25 bp, Homo sapiens
gttctgttctgtattttggcatctg

SEQ ID NO: 15896 - DNA, 25 bp, Homo sapiens
tgaacctgacaccggtgacagtgcc

SEQ ID NO: 15897 - DNA, 25 bp, Homo sapiens
ttcaatcggctactgttctgttctg

SEQ ID NO: 15898 - DNA, 25 bp, Homo sapiens
ttttcaacttggtttcgtatctgcc

SEQ ID NO: 15899 - DNA, 25 bp, Homo sapiens
aagccgtcggccaaggcggagaagg

SEQ ID NO: 15900 - DNA, 25 bp, Homo sapiens
actacacggagatggaccccgagcg

SEQ ID NO: 15901 - DNA, 25 bp, Homo sapiens
agccgcaagcacggcacggagacgc

SEQ ID NO: 15902 - DNA, 25 bp, Homo sapiens
atctggtacgaccagttcacctgcc

SEQ ID NO: 15903 - DNA, 25 bp, Homo sapiens
ctgagccgcaagcacggcacggaga

SEQ ID NO: 15904 - DNA, 25 bp, Homo sapiens
gaccctggagatgtactacacggag

SEQ ID NO: 15905 - DNA, 25 bp, Homo sapiens
gcggcacaagatctgcacgccgctg

SEQ ID NO: 15906 - DNA, 25 bp, Homo sapiens
gtacaaggccatctggtacgaccag

SEQ ID NO: 15907 - DNA, 25 bp, Homo sapiens
tgatcatgtacaaggccatctggta

SEQ ID NO: 15908 - DNA, 25 bp, Homo sapiens
tgctgcggcacaagatctgcacgcc

SEQ ID NO: 15909 - DNA, 25 bp, Homo sapiens
ttcctgctgcggcacaagatctgca

SEQ ID NO: 15910 - DNA, 25 bp, Homo sapiens
aagcgagagaggcaccttgttctcc

SEQ ID NO: 15911 - DNA, 25 bp, Homo sapiens
aatgactccaaaggcaatcccaaag

SEQ ID NO: 15912 - DNA, 25 bp, Homo sapiens
agcactgcaacagactctaccagag

SEQ ID NO: 15913 - DNA, 25 bp, Homo sapiens
aggaaaaagttgccctcaagcctga

SEQ ID NO: 15914 - DNA, 25 bp, Homo sapiens
gaagaatagccaaacttgtctttga

SEQ ID NO: 15915 - DNA, 25 bp, Homo sapiens
gagacccaaagctagtgaataattc

SEQ ID NO: 15916 - DNA, 25 bp, Homo sapiens
gctcctgctgtggttaagcactgca

SEQ ID NO: 15917 - DNA, 25 bp, Homo sapiens
gctgtggtgcattcctttgaagatc

SEQ ID NO: 15918 - DNA, 25 bp, Homo sapiens
gtgtgtgcatattgagctcctgctg

SEQ ID NO: 15919 - DNA, 25 bp, Homo sapiens
gttctccaagaacttactgtccaat

SEQ ID NO: 15920 - DNA, 25 bp, Homo sapiens
tactgtccaatcatgctgtggtgca

SEQ ID NO: 15921 - DNA, 25 bp, Homo sapiens
atgcagcattgtctttgtctgtccc

SEQ ID NO: 15922 - DNA, 25 bp, Homo sapiens
cctttgttccttgaagaatgcagca

SEQ ID NO: 15923 - DNA, 25 bp, Homo sapiens
gagaaattcgagaccattttgcaag

SEQ ID NO: 15924 - DNA, 25 bp, Homo sapiens
gagactgatgcaggcctaccagtcc

SEQ ID NO: 15925 - DNA, 25 bp, Homo sapiens
ggctcagttcttgaaaaacggtgtc

SEQ ID NO: 15926 - DNA, 25 bp, Homo sapiens
ggctggaataaagaggtgccttcag

SEQ ID NO: 15927 - DNA, 25 bp, Homo sapiens
gtacagttcctttcaagaggtaaca

SEQ ID NO: 15928 - DNA, 25 bp, Homo sapiens
gtggggtcaggacacagagtgggag

SEQ ID NO: 15929 - DNA, 25 bp, Homo sapiens
tggctttttgtctggggctggaata

SEQ ID NO: 15930 - DNA, 25 bp, Homo sapiens
tggggatgaaggcacaggcgtctcc

SEQ ID NO: 15931 - DNA, 25 bp, Homo sapiens
ttgtttcttcggctaaaggtacagt

SEQ ID NO: 15932 - DNA, 25 bp, Homo sapiens
aggtgctgactgacaagcatgcccc

SEQ ID NO: 15933 - DNA, 25 bp, Homo sapiens
cctgcccacaagtgttccgtgtggt

SEQ ID NO: 15934 - DNA, 25 bp, Homo sapiens
ctgccaggctggattgtacgggccc

SEQ ID NO: 15935 - DNA, 25 bp, Homo sapiens
gcagggtgaggctggactttggggg

SEQ ID NO: 15936 - DNA, 25 bp, Homo sapiens
gcatgcccctgagcactacagggtg

SEQ ID NO: 15937 - DNA, 25 bp, Homo sapiens
ggcagtgtgtcccagtttgaggagt

SEQ ID NO: 15938 - DNA, 25 bp, Homo sapiens
ggctcaagtacacacatgaccagct

SEQ ID NO: 15939 - DNA, 25 bp, Homo sapiens
ggtccccagattctgctctaagggg

SEQ ID NO: 15940 - DNA, 25 bp, Homo sapiens
tccatctacctgcaggtgctgactg

SEQ ID NO: 15941 - DNA, 25 bp, Homo sapiens
tgcctttgcccagaactggtgcatc

SEQ ID NO: 15942 - DNA, 25 bp, Homo sapiens
ttacactgtccaaaggtctcaccca

SEQ ID NO: 15943 - DNA, 25 bp, Homo sapiens
aaattacacttttcttgtctgcgtg

SEQ ID NO: 15944 - DNA, 25 bp, Homo sapiens
acttgtgcagaattccttttacttt

SEQ ID NO: 15945 - DNA, 25 bp, Homo sapiens
caaatggcatacggcagtcacctat

SEQ ID NO: 15946 - DNA, 25 bp, Homo sapiens
catagccatatccaggtacatccac

SEQ ID NO: 15947 - DNA, 25 bp, Homo sapiens
gagcatcagggttgttgtggctgtg

SEQ ID NO: 15948 - DNA, 25 bp, Homo sapiens
gaggacaatatccatgactgctcaa

SEQ ID NO: 15949 - DNA, 25 bp, Homo sapiens
ggccgtgctggtgattctgatcgga

SEQ ID NO: 15950 - DNA, 25 bp, Homo sapiens
gtacatccacaaatccagcaggcaa

SEQ ID NO: 15951 - DNA, 25 bp, Homo sapiens
gtcacctatgtgaacagctgcttgt

SEQ ID NO: 15952 - DNA, 25 bp, Homo sapiens
tgcgtgtaatgtttgcctggatcca

SEQ ID NO: 15953 - DNA, 25 bp, Homo sapiens
tgtgtaggccttttattgtttgttg

SEQ ID NO: 15954 - DNA, 25 bp, Homo sapiens
aaattggctcatctggctttttgaa

SEQ ID NO: 15955 - DNA, 25 bp, Homo sapiens
actgcttttcagtctcaatctttga

SEQ ID NO: 15956 - DNA, 25 bp, Homo sapiens
cttctcatttttttactgtcatata

SEQ ID NO: 15957 - DNA, 25 bp, Homo sapiens
gaatactcataattcttatctctat

SEQ ID NO: 15958 - DNA, 25 bp, Homo sapiens
gagatgcttgttctgaaagtaagat

SEQ ID NO: 15959 - DNA, 25 bp, Homo sapiens
gatcagtgaactgcttttcagtctc

SEQ ID NO: 15960 - DNA, 25 bp, Homo sapiens
gatgttgattaggtatatctacaaa

SEQ ID NO: 15961 - DNA, 25 bp, Homo sapiens
gcaaatatgttaatcttctcatttt

SEQ ID NO: 15962 - DNA, 25 bp, Homo sapiens
taagtatttttcttgtgtatgtata

SEQ ID NO: 15963 - DNA, 25 bp, Homo sapiens
tcataattcttatctctataatcaa

SEQ ID NO: 15964 - DNA, 25 bp, Homo sapiens
tttactgtcatataatcttagtgat

SEQ ID NO: 15965 - DNA, 25 bp, Homo sapiens
aaaaaccttgtttcactgtcacata

SEQ ID NO: 15966 - DNA, 25 bp, Homo sapiens
aaatcaccttcgttgaatcttaaat

SEQ ID NO: 15967 - DNA, 25 bp, Homo sapiens
aaccttgtttcactgtcacatatga

SEQ ID NO: 15968 - DNA, 25 bp, Homo sapiens
aattcaaatttattagctctactac

SEQ ID NO: 15969 - DNA, 25 bp, Homo sapiens
atgtcatgctaaggtatgtgttaca

SEQ ID NO: 15970 - DNA, 25 bp, Homo sapiens
atgtgttacatatggccaagtggaa

SEQ ID NO: 15971 - DNA, 25 bp, Homo sapiens
gaaaatgagaaatcaccttcgttga

SEQ ID NO: 15972 - DNA, 25 bp, Homo sapiens
gacatgatgcaaatagactgataca

SEQ ID NO: 15973 - DNA, 25 bp, Homo sapiens
gaggggctttcatacaaatagactg

SEQ ID NO: 15974 - DNA, 25 bp, Homo sapiens
gattttggaattttatgtcatgcta

SEQ ID NO: 15975 - DNA, 25 bp, Homo sapiens
gctctactacttgaatgattttgga

SEQ ID NO: 15976 - DNA, 25 bp, Homo sapiens
gatcatccgaaacaatggccttgaa

SEQ ID NO: 15977 - DNA, 25 bp, Homo sapiens
gcctcttgatgacactcaacgctgg

SEQ ID NO: 15978 - DNA, 25 bp, Homo sapiens
ggaactgttcaaagctatccaactt

SEQ ID NO: 15979 - DNA, 25 bp, Homo sapiens
ggagaggcgtctgcttttggaaagg

SEQ ID NO: 15980 - DNA, 25 bp, Homo sapiens
ggatctacgtggtaccatggggagt

SEQ ID NO: 15981 - DNA, 25 bp, Homo sapiens
ggtctgaatatgtaatgcctcgtga

SEQ ID NO: 15982 - DNA, 25 bp, Homo sapiens
ggtgatgatctttcaggcaatctca

SEQ ID NO: 15983 - DNA, 25 bp, Homo sapiens
gtatattgtgcatggtctcttctgg

SEQ ID NO: 15984 - DNA, 25 bp, Homo sapiens
gtcccttacacatcggccaaggaat

SEQ ID NO: 15985 - DNA, 25 bp, Homo sapiens
gtggaaccagggatacagcagccgg

SEQ ID NO: 15986 - DNA, 25 bp, Homo sapiens
tggtctcttccacgttgattttgaa

SEQ ID NO: 15987 - DNA, 25 bp, Homo sapiens
agctccgcggtatattactgcaact

SEQ ID NO: 15988 - DNA, 25 bp, Homo sapiens
cctgggtgtgttttttcaatcttct

SEQ ID NO: 15989 - DNA, 25 bp, Homo sapiens
cgccgagctcctcggggaggtggac

SEQ ID NO: 15990 - DNA, 25 bp, Homo sapiens
gagatttgtttcccacagttggatt

SEQ ID NO: 15991 - DNA, 25 bp, Homo sapiens
gcaggccagaagcagtgttacacac

SEQ ID NO: 15992 - DNA, 25 bp, Homo sapiens
gctaaggaaatcctcagactcctgg

SEQ ID NO: 15993 - DNA, 25 bp, Homo sapiens
ggtaatttattttgtctgccacttg

SEQ ID NO: 15994 - DNA, 25 bp, Homo sapiens
tactgcaactatcctgacgtgtgac

SEQ ID NO: 15995 - DNA, 25 bp, Homo sapiens
tgaacagtatctgcacttcgtgtgc

SEQ ID NO: 15996 - DNA, 25 bp, Homo sapiens
tgacgtgtgacaggtccctgatccg

SEQ ID NO: 15997 - DNA, 25 bp, Homo sapiens
tggaccgcacggaatttgaacagta

SEQ ID NO: 15998 - DNA, 25 bp, Homo sapiens
aaaacacctgaatgactctaagact

SEQ ID NO: 15999 - DNA, 25 bp, Homo sapiens
aatatctcaccattacaacaaattg

SEQ ID NO: 16000 - DNA, 25 bp, Homo sapiens
aatttattctacttgcttataatgt

SEQ ID NO: 16001 - DNA, 25 bp, Homo sapiens
acacacaaacatcaagaggctattt

SEQ ID NO: 16002 - DNA, 25 bp, Homo sapiens
agctgtcttacagaagatcttttat

SEQ ID NO: 16003 - DNA, 25 bp, Homo sapiens
atgtattttcaagtctaagctgtct

SEQ ID NO: 16004 - DNA, 25 bp, Homo sapiens
gactctaagactgatatgtattttc

SEQ ID NO: 16005 - DNA, 25 bp, Homo sapiens
gtgcattactggtgaaggtattatc

SEQ ID NO: 16006 - DNA, 25 bp, Homo sapiens
gtttttctattagctctagctgcat

SEQ ID NO: 16007 - DNA, 25 bp, Homo sapiens
tagctctagctgcatatttgatgta

SEQ ID NO: 16008 - DNA, 25 bp, Homo sapiens
tgaatgttctggcttactctgcctc

SEQ ID NO: 16009 - DNA, 25 bp, Homo sapiens
acaagcgcacccatgggtgcctcgg

SEQ ID NO: 16010 - DNA, 25 bp, Homo sapiens
actgctgaccacatttggctacttc

SEQ ID NO: 16011 - DNA, 25 bp, Homo sapiens
ctcttccagtggagccagatgccga

SEQ ID NO: 16012 - DNA, 25 bp, Homo sapiens
ctgtgtgtgcctgggagtccataca

SEQ ID NO: 16013 - DNA, 25 bp, Homo sapiens
gaaggaacacacacccattatctgt

SEQ ID NO: 16014 - DNA, 25 bp, Homo sapiens
gaatcgctcataggcatgggactcc

SEQ ID NO: 16015 - DNA, 25 bp, Homo sapiens
gacctgctggactagtggtccttgc

SEQ ID NO: 16016 - DNA, 25 bp, Homo sapiens
gatgcaccagtacatgtgggccttc

SEQ ID NO: 16017 - DNA, 25 bp, Homo sapiens
ggaactgggtatacctctcttccag

SEQ ID NO: 16018 - DNA, 25 bp, Homo sapiens
tagctgcacagaccttaaaccctga

SEQ ID NO: 16019 - DNA, 25 bp, Homo sapiens
tctgcgctttgccaaagtcgcttct

SEQ ID NO: 16020 - DNA, 25 bp, Homo sapiens
aagagcagatggcctggctgctgct

SEQ ID NO: 16021 - DNA, 25 bp, Homo sapiens
cattatccatctttgcactatctgt

SEQ ID NO: 16022 - DNA, 25 bp, Homo sapiens
gctattctccatactctgtaacagt

SEQ ID NO: 16023 - DNA, 25 bp, Homo sapiens
tagtgaacattcgacctccattacg

SEQ ID NO: 16024 - DNA, 25 bp, Homo sapiens
aatcttaaaattcatcccatgtgtg

SEQ ID NO: 16025 - DNA, 25 bp, Homo sapiens
agtaactttgtttatccctcaagca

SEQ ID NO: 16026 - DNA, 25 bp, Homo sapiens
atatttctacgctggtattgtctgt

SEQ ID NO: 16027 - DNA, 25 bp, Homo sapiens
atcccatgtgtgatcataaactcat

SEQ ID NO: 16028 - DNA, 25 bp, Homo sapiens
ctcctactcctgataaaagtcataa

SEQ ID NO: 16029 - DNA, 25 bp, Homo sapiens
gaacaaagatcctttttcatactga

SEQ ID NO: 16030 - DNA, 25 bp, Homo sapiens
gctggtattgtctgtgattgggtct

SEQ ID NO: 16031 - DNA, 25 bp, Homo sapiens
gtttatccctcaagcaaatcctgat

SEQ ID NO: 16032 - DNA, 25 bp, Homo sapiens
taccaccatttgaaccttaacgaag

SEQ ID NO: 16033 - DNA, 25 bp, Homo sapiens
tgatgacattgatcctactcctact

SEQ ID NO: 16034 - DNA, 25 bp, Homo sapiens
tgatgcaacagttttctgaaatgat

SEQ ID NO: 16035 - DNA, 25 bp, Homo sapiens
accagcaccgcagatgttgtcaagg

SEQ ID NO: 16036 - DNA, 25 bp, Homo sapiens
acgaggcatcaggaaccacagccat

SEQ ID NO: 16037 - DNA, 25 bp, Homo sapiens
agaggtgaccatctacaaccaccct

SEQ ID NO: 16038 - DNA, 25 bp, Homo sapiens
cacggtttgcaggccattttggttc

SEQ ID NO: 16039 - DNA, 25 bp, Homo sapiens
cagaacaaagcagccgcatgaccct

SEQ ID NO: 16040 - DNA, 25 bp, Homo sapiens
gaaagctagcacttgactcacactc

SEQ ID NO: 16041 - DNA, 25 bp, Homo sapiens
ggaaggctcaggttacttcttcctc

SEQ ID NO: 16042 - DNA, 25 bp, Homo sapiens
gtgtcgccatggtaagcttgggcca

SEQ ID NO: 16043 - DNA, 25 bp, Homo sapiens
tgcagctggtgtcccaggacgatga

SEQ ID NO: 16044 - DNA, 25 bp, Homo sapiens
ttcattccttatctgggctgttgtg

SEQ ID NO: 16045 - DNA, 25 bp, Homo sapiens
ttgactcacactcggaatcccagaa

SEQ ID NO: 16046 - DNA, 25 bp, Homo sapiens
aaaactaccgtgcgatgcctggaag

SEQ ID NO: 16047 - DNA, 25 bp, Homo sapiens
aacccagaagagtccaagagtccaa

SEQ ID NO: 16048 - DNA, 25 bp, Homo sapiens
caaaaggtatgtgaaggccttccct

SEQ ID NO: 16049 - DNA, 25 bp, Homo sapiens
ctgctgggtttggaggtgtccccac

SEQ ID NO: 16050 - DNA, 25 bp, Homo sapiens
ctggtcttggattttgctatgtcaa

SEQ ID NO: 16051 - DNA, 25 bp, Homo sapiens
gaaggccaatgatagcaaccctaat

SEQ ID NO: 16052 - DNA, 25 bp, Homo sapiens
gagtccaagcaaaactaccgtgcga

SEQ ID NO: 16053 - DNA, 25 bp, Homo sapiens
ggaaactagcaccatgtctacagaa

SEQ ID NO: 16054 - DNA, 25 bp, Homo sapiens
tgcctggaagctgaagtttagatga

SEQ ID NO: 16055 - DNA, 25 bp, Homo sapiens
ttccacttctattccacggagaaaa

SEQ ID NO: 16056 - DNA, 25 bp, Homo sapiens
ttgtgtcacagaagtttttatggaa

SEQ ID NO: 16057 - DNA, 25 bp, Homo sapiens
aaccagaacaacctgcacttctgcc

SEQ ID NO: 16058 - DNA, 25 bp, Homo sapiens
atgtcacaactttgcaagctctgcc

SEQ ID NO: 16059 - DNA, 25 bp, Homo sapiens
caaagcgaaatgcaggtccaccagg

SEQ ID NO: 16060 - DNA, 25 bp, Homo sapiens
caggcaggagtttcagaccctatcc

SEQ ID NO: 16061 - DNA, 25 bp, Homo sapiens
ccagggcaactgcctgacgttgcac

SEQ ID NO: 16062 - DNA, 25 bp, Homo sapiens
gacgttgcacgatttcagcttcatt

SEQ ID NO: 16063 - DNA, 25 bp, Homo sapiens
gatcataacacctacctcatggagt

SEQ ID NO: 16064 - DNA, 25 bp, Homo sapiens
gccagcaggacggcaggactctagg

SEQ ID NO: 16065 - DNA, 25 bp, Homo sapiens
gtgcctggtacatgggcagtgccca

SEQ ID NO: 16066 - DNA, 25 bp, Homo sapiens
tgtggcccctggacgggtacaataa

SEQ ID NO: 16067 - DNA, 25 bp, Homo sapiens
ttgggttcagcccatctgggctcaa

SEQ ID NO: 16068 - DNA, 25 bp, Homo sapiens
aaggcacgagggaacctcactgcgc

SEQ ID NO: 16069 - DNA, 25 bp, Homo sapiens
cagtgcgcatgttcactgggcgtct

SEQ ID NO: 16070 - DNA, 25 bp, Homo sapiens
cagtgtggggaacgcggcggagctg

SEQ ID NO: 16071 - DNA, 25 bp, Homo sapiens
ctgcatcagtcaaacaccggggata

SEQ ID NO: 16072 - DNA, 25 bp, Homo sapiens
gaaccagcagctgaaagtcgggatc

SEQ ID NO: 16073 - DNA, 25 bp, Homo sapiens
gataaggaggggcaccacagccctt

SEQ ID NO: 16074 - DNA, 25 bp, Homo sapiens
ggagcccagtaatggagagccccaa

SEQ ID NO: 16075 - DNA, 25 bp, Homo sapiens
tactgagacacggcggacacacaca

SEQ ID NO: 16076 - DNA, 25 bp, Homo sapiens
tcctacacctgggcagcagacagaa

SEQ ID NO: 16077 - DNA, 25 bp, Homo sapiens
tgagatcccagtgcgcgacatggaa

SEQ ID NO: 16078 - DNA, 25 bp, Homo sapiens
ttgggttccggcgtcaaggtgaaga

SEQ ID NO: 16079 - DNA, 25 bp, Homo sapiens
aacctgcagatatacacattcccat

SEQ ID NO: 16080 - DNA, 25 bp, Homo sapiens
aactagagactacggctgtggtggt

SEQ ID NO: 16081 - DNA, 25 bp, Homo sapiens
acacattcccatgcactgacataag

SEQ ID NO: 16082 - DNA, 25 bp, Homo sapiens
acatttcccctatataattccaaca

SEQ ID NO: 16083 - DNA, 25 bp, Homo sapiens
acggctgtggtggtaacctgcagat

SEQ ID NO: 16084 - DNA, 25 bp, Homo sapiens
attacctatattctcctgatactga

SEQ ID NO: 16085 - DNA, 25 bp, Homo sapiens
attccaacagcagtttctctagttc

SEQ ID NO: 16086 - DNA, 25 bp, Homo sapiens
gaatttttttctttaggcctcaatg

SEQ ID NO: 16087 - DNA, 25 bp, Homo sapiens
gattaccaagtcattcacctgaaca

SEQ ID NO: 16088 - DNA, 25 bp, Homo sapiens
gtactagaggagcccttttccaatg

SEQ ID NO: 16089 - DNA, 25 bp, Homo sapiens
tgtcattttaattacctagctggaa

SEQ ID NO: 16090 - DNA, 25 bp, Homo sapiens
acagagattgcctggggaggctgag

SEQ ID NO: 16091 - DNA, 25 bp, Homo sapiens
acccccaaggcgacgcacttgggag

SEQ ID NO: 16092 - DNA, 25 bp, Homo sapiens
acttgggagccggtggtctcaaaca

SEQ ID NO: 16093 - DNA, 25 bp, Homo sapiens
atctacatgcttgggttggagcgca

SEQ ID NO: 16094 - DNA, 25 bp, Homo sapiens
ccagaccaggaggcctaggggtgag

SEQ ID NO: 16095 - DNA, 25 bp, Homo sapiens
ccgaccctacacagagattgcctgg

SEQ ID NO: 16096 - DNA, 25 bp, Homo sapiens
gaggcctgcaccggagatctcaggc

SEQ ID NO: 16097 - DNA, 25 bp, Homo sapiens
gcccagaaccatcaagggatccctt

SEQ ID NO: 16098 - DNA, 25 bp, Homo sapiens
gcccatgcccagaaccatcaaggga

SEQ ID NO: 16099 - DNA, 25 bp, Homo sapiens
gttggagcgcagcagtaaacaccct

SEQ ID NO: 16100 - DNA, 25 bp, Homo sapiens
tagtccccttctgaaatctacatgc

SEQ ID NO: 16101 - DNA, 25 bp, Homo sapiens
aagcgaatcttataaatgttcaatt

SEQ ID NO: 16102 - DNA, 25 bp, Homo sapiens
agagcctacaggatacacgtgagat

SEQ ID NO: 16103 - DNA, 25 bp, Homo sapiens
atcccagctacttgatgcgaaggct

SEQ ID NO: 16104 - DNA, 25 bp, Homo sapiens
atgatgtagattttagagctcctta

SEQ ID NO: 16105 - DNA, 25 bp, Homo sapiens
atgtcacgtgtagaagatcgttgtg

SEQ ID NO: 16106 - DNA, 25 bp, Homo sapiens
cactttctagtgagctaaccgtaac

SEQ ID NO: 16107 - DNA, 25 bp, Homo sapiens
gagctaaccgtaacagagagcctac

SEQ ID NO: 16108 - DNA, 25 bp, Homo sapiens
gagctccttaaaacataaagcgaat

SEQ ID NO: 16109 - DNA, 25 bp, Homo sapiens
taagctcacttaggtcactttctag

SEQ ID NO: 16110 - DNA, 25 bp, Homo sapiens
tacttgatgcgaaggctgaggcaaa

SEQ ID NO: 16111 - DNA, 25 bp, Homo sapiens
tcaagcaatccagaatcttccaaga

SEQ ID NO: 16112 - DNA, 25 bp, Homo sapiens
aactgatcttagcaccggccaaata

SEQ ID NO: 16113 - DNA, 25 bp, Homo sapiens
acctcgctctagaaattgtgcctgc

SEQ ID NO: 16114 - DNA, 25 bp, Homo sapiens
atgagaatgatcacgtgacccaccc

SEQ ID NO: 16115 - DNA, 25 bp, Homo sapiens
cagagactgggttccaatctcaccc

SEQ ID NO: 16116 - DNA, 25 bp, Homo sapiens
ctccctgacactatccaggacctgg

SEQ ID NO: 16117 - DNA, 25 bp, Homo sapiens
gagcccctttagtcaaagactcctg

SEQ ID NO: 16118 - DNA, 25 bp, Homo sapiens
gcaaccggcaagaggccgtcactgt

SEQ ID NO: 16119 - DNA, 25 bp, Homo sapiens
gtcactgtggaaagtacctcgctct

SEQ ID NO: 16120 - DNA, 25 bp, Homo sapiens
gtggctgaaggcagcttccacagct

SEQ ID NO: 16121 - DNA, 25 bp, Homo sapiens
tggaaaggagttgcctcttctccaa

SEQ ID NO: 16122 - DNA, 25 bp, Homo sapiens
ttgggcgacttcaagggcctggcat

SEQ ID NO: 16123 - DNA, 25 bp, Homo sapiens
aacacgtagcagtgtccctgagaac

SEQ ID NO: 16124 - DNA, 25 bp, Homo sapiens
aacccgagcttttggacagctctcc

SEQ ID NO: 16125 - DNA, 25 bp, Homo sapiens
acagctctccagaagcatgaactgc

SEQ ID NO: 16126 - DNA, 25 bp, Homo sapiens
agcaccttggtcatggattagcccc

SEQ ID NO: 16127 - DNA, 25 bp, Homo sapiens
atccacggccttttctggcaagaga

SEQ ID NO: 16128 - DNA, 25 bp, Homo sapiens
attagcccctcctggaaaatggtgt

SEQ ID NO: 16129 - DNA, 25 bp, Homo sapiens
cacagacaatgaccactaccctggg

SEQ ID NO: 16130 - DNA, 25 bp, Homo sapiens
cacctcgggcctggatcccaggcct

SEQ ID NO: 16131 - DNA, 25 bp, Homo sapiens
gaagggcccaggaaggatgctctca

SEQ ID NO: 16132 - DNA, 25 bp, Homo sapiens
gatgctctcataaggcccaggaagg

SEQ ID NO: 16133 - DNA, 25 bp, Homo sapiens
ggatgctctcataagcaccttggtc

SEQ ID NO: 16134 - DNA, 25 bp, Homo sapiens
actaactttttattcatgcacttca

SEQ ID NO: 16135 - DNA, 25 bp, Homo sapiens
cacttacaatgctgagcggtcccgg

SEQ ID NO: 16136 - DNA, 25 bp, Homo sapiens
cagcgttatccgggttctgatgtca

SEQ ID NO: 16137 - DNA, 25 bp, Homo sapiens
ccaccaacttcatcagagagtagct

SEQ ID NO: 16138 - DNA, 25 bp, Homo sapiens
ctccctgggctcataagccagacca

SEQ ID NO: 16139 - DNA, 25 bp, Homo sapiens
gactttgattggtagcatccacgcc

SEQ ID NO: 16140 - DNA, 25 bp, Homo sapiens
gagctacgacaagcacgtcacttac

SEQ ID NO: 16141 - DNA, 25 bp, Homo sapiens
gcacttcaaacaaactttactacta

SEQ ID NO: 16142 - DNA, 25 bp, Homo sapiens
gggaatgcacctattattgctatat

SEQ ID NO: 16143 - DNA, 25 bp, Homo sapiens
gtaaagcccctatggttctaatcag

SEQ ID NO: 16144 - DNA, 25 bp, Homo sapiens
gttctaatcagcgttatccgggttc

SEQ ID NO: 16145 - DNA, 25 bp, Homo sapiens
aagagtacatagtttgatccattcc

SEQ ID NO: 16146 - DNA, 25 bp, Homo sapiens
aatctccttgtctattagccactag

SEQ ID NO: 16147 - DNA, 25 bp, Homo sapiens
atagccataatttgccatctttgga

SEQ ID NO: 16148 - DNA, 25 bp, Homo sapiens
attccatttcttagtgtatgcatct

SEQ ID NO: 16149 - DNA, 25 bp, Homo sapiens
cattcctacggtcgagtctaatcaa

SEQ ID NO: 16150 - DNA, 25 bp, Homo sapiens
gaaggctatgtggtaagctctacta

SEQ ID NO: 16151 - DNA, 25 bp, Homo sapiens
gatcattgattggacctcattacat

SEQ ID NO: 16152 - DNA, 25 bp, Homo sapiens
ggtcgagtctaatcaattccatttc

SEQ ID NO: 16153 - DNA, 25 bp, Homo sapiens
gtggacgtctttggaatttgttagg

SEQ ID NO: 16154 - DNA, 25 bp, Homo sapiens
taagggggctgtggacgtctttgga

SEQ ID NO: 16155 - DNA, 25 bp, Homo sapiens
tgaggcttacaacttgctaacccca

SEQ ID NO: 16156 - DNA, 25 bp, Homo sapiens
aaacagcacaatggtgaccactgat

SEQ ID NO: 16157 - DNA, 25 bp, Homo sapiens
aaggctttattaggtatatctgagg

SEQ ID NO: 16158 - DNA, 25 bp, Homo sapiens
agggatatccccttggatttcactt

SEQ ID NO: 16159 - DNA, 25 bp, Homo sapiens
catacgtatctatagagctggcatg

SEQ ID NO: 16160 - DNA, 25 bp, Homo sapiens
ctagtgaaatgaccccttgactttg

SEQ ID NO: 16161 - DNA, 25 bp, Homo sapiens
gaaaccagaattttagacagcaagc

SEQ ID NO: 16162 - DNA, 25 bp, Homo sapiens
gagctggcatgtaattcttcctcta

SEQ ID NO: 16163 - DNA, 25 bp, Homo sapiens
gtatatctgaggaagtgggtcacat

SEQ ID NO: 16164 - DNA, 25 bp, Homo sapiens
tccatgtcttggatacatacgtatc

SEQ ID NO: 16165 - DNA, 25 bp, Homo sapiens
tggcatgtaattcttcctctataaa

SEQ ID NO: 16166 - DNA, 25 bp, Homo sapiens
tggtgaccactgataaaggctttat

SEQ ID NO: 16167 - DNA, 25 bp, Homo sapiens
atggctttgctgcaaccagactctt

SEQ ID NO: 16168 - DNA, 25 bp, Homo sapiens
ctccattcaatcccttgatgcactg

SEQ ID NO: 16169 - DNA, 25 bp, Homo sapiens
gaacaaggaagtcatgccctccatt

SEQ ID NO: 16170 - DNA, 25 bp, Homo sapiens
gcaaacatgtgtcgtgggattccaa

SEQ ID NO: 16171 - DNA, 25 bp, Homo sapiens
ggaacgtgctacacgaccagtgtac

SEQ ID NO: 16172 - DNA, 25 bp, Homo sapiens
ggactcctggaattccatctgggat

SEQ ID NO: 16173 - DNA, 25 bp, Homo sapiens
gggattccaacatacatggctgagg

SEQ ID NO: 16174 - DNA, 25 bp, Homo sapiens
gggcctgatgtactcagtcaaccca

SEQ ID NO: 16175 - DNA, 25 bp, Homo sapiens
gggctccagtggtttttaccatgtc

SEQ ID NO: 16176 - DNA, 25 bp, Homo sapiens
gtcgatgacctgagcaagttcggaa

SEQ ID NO: 16177 - DNA, 25 bp, Homo sapiens
tttagtcgtctgaatatgctgtgca

SEQ ID NO: 16178 - DNA, 25 bp, Homo sapiens
aactcttccgaaacagcagcatcaa

SEQ ID NO: 16179 - DNA, 25 bp, Homo sapiens
cagtcacacctagacctggaggatc

SEQ ID NO: 16180 - DNA, 25 bp, Homo sapiens
ctcgccactggctcggagagtagac

SEQ ID NO: 16181 - DNA, 25 bp, Homo sapiens
gagaatacaacgtccagcaacagtg

SEQ ID NO: 16182 - DNA, 25 bp, Homo sapiens
gcaatgactggaacttgccggtgcc

SEQ ID NO: 16183 - DNA, 25 bp, Homo sapiens
ggaatggtacccagctgcagaactt

SEQ ID NO: 16184 - DNA, 25 bp, Homo sapiens
tcatcttcatcggcttggcaggact

SEQ ID NO: 16185 - DNA, 25 bp, Homo sapiens
tgaccacccgccggcggaagaagga

SEQ ID NO: 16186 - DNA, 25 bp, Homo sapiens
tgaggaatttctgcggatgacccgg

SEQ ID NO: 16187 - DNA, 25 bp, Homo sapiens
ttgaggatgcgctcaaccaactctt

SEQ ID NO: 16188 - DNA, 25 bp, Homo sapiens
tttcaacattcaggtctgtccccaa

SEQ ID NO: 16189 - DNA, 25 bp, Homo sapiens
aaaatagcaatcccttttatttcat

SEQ ID NO: 16190 - DNA, 25 bp, Homo sapiens
atcccctggcaggctaaagtgctgt

SEQ ID NO: 16191 - DNA, 25 bp, Homo sapiens
gaaatggactttcatcctggaaata

SEQ ID NO: 16192 - DNA, 25 bp, Homo sapiens
gatttccaatcacatctttagtgtc

SEQ ID NO: 16193 - DNA, 25 bp, Homo sapiens
gggtgaccacagtctgtaattcccc

SEQ ID NO: 16194 - DNA, 25 bp, Homo sapiens
gggtggcggtaattggtgatacttc

SEQ ID NO: 16195 - DNA, 25 bp, Homo sapiens
ggtaatgcctgattcacaactttga

SEQ ID NO: 16196 - DNA, 25 bp, Homo sapiens
gtaattccccacttcaatacaaagg

SEQ ID NO: 16197 - DNA, 25 bp, Homo sapiens
gtgtcgttcttttccaacaaaatag

SEQ ID NO: 16198 - DNA, 25 bp, Homo sapiens
tcaatgggtgtcctaggaacctttt

SEQ ID NO: 16199 - DNA, 25 bp, Homo sapiens
tgtgtttagacaacgtcatcccctg

SEQ ID NO: 16200 - DNA, 25 bp, Homo sapiens
acccggtccttcagtggactgagag

SEQ ID NO: 16201 - DNA, 25 bp, Homo sapiens
aggaagtggtcaagttctcagcctc

SEQ ID NO: 16202 - DNA, 25 bp, Homo sapiens
agtgtgagggtcaggatccgtctgt

SEQ ID NO: 16203 - DNA, 25 bp, Homo sapiens
caccaactttggcaagggcatccgc

SEQ ID NO: 16204 - DNA, 25 bp, Homo sapiens
gacgttgtcagtcaagaccagcctt

SEQ ID NO: 16205 - DNA, 25 bp, Homo sapiens
ggcatccgctacgtatcttttgagc

SEQ ID NO: 16206 - DNA, 25 bp, Homo sapiens
ggtccgccttctggatgtgtatgaa

SEQ ID NO: 16207 - DNA, 25 bp, Homo sapiens
gtacgggagagacgtgagttcctgg

SEQ ID NO: 16208 - DNA, 25 bp, Homo sapiens
gtgaaaccgtctccacaaataattt

SEQ ID NO: 16209 - DNA, 25 bp, Homo sapiens
tccgtctgtcctagcgactggacta

SEQ ID NO: 16210 - DNA, 25 bp, Homo sapiens
tggactactgcctgacgttgtcagt

SEQ ID NO: 16211 - DNA, 25 bp, Homo sapiens
attgcatcgcatgctgctgattttc

SEQ ID NO: 16212 - DNA, 25 bp, Homo sapiens
cacagtcactggcaacacatctagt

SEQ ID NO: 16213 - DNA, 25 bp, Homo sapiens
catccttctggtattgtgtcactct

SEQ ID NO: 16214 - DNA, 25 bp, Homo sapiens
ctcaaccacttcgcatatcatttaa

SEQ ID NO: 16215 - DNA, 25 bp, Homo sapiens
ctctggaaattcttgctgtgctggc

SEQ ID NO: 16216 - DNA, 25 bp, Homo sapiens
gaaactcttcttcaaacttatcttc

SEQ ID NO: 16217 - DNA, 25 bp, Homo sapiens
gaagcagttcttgctgacctttcta

SEQ ID NO: 16218 - DNA, 25 bp, Homo sapiens
gatggttcgagctttctctggatac

SEQ ID NO: 16219 - DNA, 25 bp, Homo sapiens
gtcactctgtctgctgtttgaaact

SEQ ID NO: 16220 - DNA, 25 bp, Homo sapiens
taaagatcatgttccctcttcagtt

SEQ ID NO: 16221 - DNA, 25 bp, Homo sapiens
tactgtcacctgatcttcttcacag

SEQ ID NO: 16222 - DNA, 25 bp, Homo sapiens
accgcagcatggtgagcgtgccggt

SEQ ID NO: 16223 - DNA, 25 bp, Homo sapiens
agcgcgcagtcatggagaccatcgc

SEQ ID NO: 16224 - DNA, 25 bp, Homo sapiens
ctgccggaggcacggtgcctgtgtc

SEQ ID NO: 16225 - DNA, 25 bp, Homo sapiens
ctggcccagagaaagtgtgaggtca

SEQ ID NO: 16226 - DNA, 25 bp, Homo sapiens
cttcaccatgcaggaggaccgcagc

SEQ ID NO: 16227 - DNA, 25 bp, Homo sapiens
ggaacagctcagagctggcccagag

SEQ ID NO: 16228 - DNA, 25 bp, Homo sapiens
ggaacatcgaggagatggtggccca

SEQ ID NO: 16229 - DNA, 25 bp, Homo sapiens
ggacctggtgtcacggatgaaaccg

SEQ ID NO: 16230 - DNA, 25 bp, Homo sapiens
ggtcaacttgcagctgtggatgtcc

SEQ ID NO: 16231 - DNA, 25 bp, Homo sapiens
tcatggagaccatcgctgtgggctg

SEQ ID NO: 16232 - DNA, 25 bp, Homo sapiens
tgaaaccgtatgcccgcatggagga

SEQ ID NO: 16233 - DNA, 25 bp, Homo sapiens
aacaggtccaaccctaagtgagaca

SEQ ID NO: 16234 - DNA, 25 bp, Homo sapiens
aaccagcctttcaacagtgtgcatc

SEQ ID NO: 16235 - DNA, 25 bp, Homo sapiens
aatgctacctcgtggctacacatat

SEQ ID NO: 16236 - DNA, 25 bp, Homo sapiens
caaggttgtgtctccagaagcaaac

SEQ ID NO: 16237 - DNA, 25 bp, Homo sapiens
caccagtctcgctgcaatcaaggtt

SEQ ID NO: 16238 - DNA, 25 bp, Homo sapiens
ctccgcgtgtctgcagtgtaaagtt

SEQ ID NO: 16239 - DNA, 25 bp, Homo sapiens
gattccatcataggacccattcgtc

SEQ ID NO: 16240 - DNA, 25 bp, Homo sapiens
gggagattccagtttaatgccttta

SEQ ID NO: 16241 - DNA, 25 bp, Homo sapiens
ggtgtatcccttatttggacactat

SEQ ID NO: 16242 - DNA, 25 bp, Homo sapiens
gtgagacatgtttctccaggatgcc

SEQ ID NO: 16243 - DNA, 25 bp, Homo sapiens
ttccttcatggttctagctctgaat

SEQ ID NO: 16244 - DNA, 25 bp, Homo sapiens
aaggtgtgtgttgggttgttttgct

SEQ ID NO: 16245 - DNA, 25 bp, Homo sapiens
aatgtgccctgtttgactaagtcaa

SEQ ID NO: 16246 - DNA, 25 bp, Homo sapiens
attttttgccttcagagggtcagac

SEQ ID NO: 16247 - DNA, 25 bp, Homo sapiens
ccgttttgtcttcttctaaggtgtg

SEQ ID NO: 16248 - DNA, 25 bp, Homo sapiens
ctttcatgtgtatatgcctctgcca

SEQ ID NO: 16249 - DNA, 25 bp, Homo sapiens
gacaagcataaacaatgtgccctgt

SEQ ID NO: 16250 - DNA, 25 bp, Homo sapiens
gagagttctcaagtgacaaccattg

SEQ ID NO: 16251 - DNA, 25 bp, Homo sapiens
gagggtcagacgaccagttgcctgc

SEQ ID NO: 16252 - DNA, 25 bp, Homo sapiens
gcctctgccatagaatactcagtct

SEQ ID NO: 16253 - DNA, 25 bp, Homo sapiens
ggggtttcttcataaagatcttgat

SEQ ID NO: 16254 - DNA, 25 bp, Homo sapiens
tagaatactcagtcttgtggtcaag

SEQ ID NO: 16255 - DNA, 25 bp, Homo sapiens
atcgcttccccaatgtttgtaaatt

SEQ ID NO: 16256 - DNA, 25 bp, Homo sapiens
attacttgatctcagacccatacct

SEQ ID NO: 16257 - DNA, 25 bp, Homo sapiens
caaaatgtgcggactgaatcccaga

SEQ ID NO: 16258 - DNA, 25 bp, Homo sapiens
caatgccttcattaggtaccaccgg

SEQ ID NO: 16259 - DNA, 25 bp, Homo sapiens
cttgctacctgtattacttgatctc

SEQ ID NO: 16260 - DNA, 25 bp, Homo sapiens
gaatcactcttttactgttgttgga

SEQ ID NO: 16261 - DNA, 25 bp, Homo sapiens
gacccatacctgatggttcagtctg

SEQ ID NO: 16262 - DNA, 25 bp, Homo sapiens
gtaccaccggcacttacaaaatgtg

SEQ ID NO: 16263 - DNA, 25 bp, Homo sapiens
gtattactgcaacttgaatcactct

SEQ ID NO: 16264 - DNA, 25 bp, Homo sapiens
taaacttatcctgtaccaatgtatt

SEQ ID NO: 16265 - DNA, 25 bp, Homo sapiens
tatatggattgtatcgcttccccaa

SEQ ID NO: 16266 - DNA, 25 bp, Homo sapiens
aaactacttactctgatggaccaat

SEQ ID NO: 16267 - DNA, 25 bp, Homo sapiens
aacatgatggacacccttgggtctg

SEQ ID NO: 16268 - DNA, 25 bp, Homo sapiens
aaggagccagcatcttacttggtcc

SEQ ID NO: 16269 - DNA, 25 bp, Homo sapiens
agggtaccagcacggaagactttct

SEQ ID NO: 16270 - DNA, 25 bp, Homo sapiens
atggtggctacacaaactgaccctc

SEQ ID NO: 16271 - DNA, 25 bp, Homo sapiens
attatgaaaaccaccttcctatgtt

SEQ ID NO: 16272 - DNA, 25 bp, Homo sapiens
gaagactttcttaaaacgcaacctg

SEQ ID NO: 16273 - DNA, 25 bp, Homo sapiens
gattcagagccatgaccggacttgt

SEQ ID NO: 16274 - DNA, 25 bp, Homo sapiens
ggagctcttttgggggtgtagtggt

SEQ ID NO: 16275 - DNA, 25 bp, Homo sapiens
tgaagcctttcagataccaatttag

SEQ ID NO: 16276 - DNA, 25 bp, Homo sapiens
tgtagtggtgcccccacatgaacat

SEQ ID NO: 16277 - DNA, 25 bp, Homo sapiens
cttgtcagtcatttcctatgtgtat

SEQ ID NO: 16278 - DNA, 25 bp, Homo sapiens
ctttattcgatattttgttgccatg

SEQ ID NO: 16279 - DNA, 25 bp, Homo sapiens
gaatagagctcacaactactccttt

SEQ ID NO: 16280 - DNA, 25 bp, Homo sapiens
gacttttaccaagtggaaccttctg

SEQ ID NO: 16281 - DNA, 25 bp, Homo sapiens
gattacgaatgcttttgactttttt

SEQ ID NO: 16282 - DNA, 25 bp, Homo sapiens
gcaaacttaccagatcttgtcagtc

SEQ ID NO: 16283 - DNA, 25 bp, Homo sapiens
gctcacaactactcctttagacatg

SEQ ID NO: 16284 - DNA, 25 bp, Homo sapiens
ggctctaggagaaacctttattcga

SEQ ID NO: 16285 - DNA, 25 bp, Homo sapiens
gtggaaccttctgagatccctttaa

SEQ ID NO: 16286 - DNA, 25 bp, Homo sapiens
tatgtgtatgttgacctggataaga

SEQ ID NO: 16287 - DNA, 25 bp, Homo sapiens
tgttacttaaagctaatctaccaaa

SEQ ID NO: 16288 - DNA, 25 bp, Homo sapiens
aaggaaactcatctccgaggttgac

SEQ ID NO: 16289 - DNA, 25 bp, Homo sapiens
agcgacggcgacggcgaaatcagct

SEQ ID NO: 16290 - DNA, 25 bp, Homo sapiens
aggagttcgcgaggatgctcgccca

SEQ ID NO: 16291 - DNA, 25 bp, Homo sapiens
atctccgaggttgacagcgacggcg

SEQ ID NO: 16292 - DNA, 25 bp, Homo sapiens
cagaccttgggcagaaggaggcctc

SEQ ID NO: 16293 - DNA, 25 bp, Homo sapiens
catcaccgtggacgagctcaggcgg

SEQ ID NO: 16294 - DNA, 25 bp, Homo sapiens
ccaggacgggcgggtgaactacgag

SEQ ID NO: 16295 - DNA, 25 bp, Homo sapiens
cgcgccttcgaccaggatggcgacg

SEQ ID NO: 16296 - DNA, 25 bp, Homo sapiens
ctctctgccttcagaccttgggcag

SEQ ID NO: 16297 - DNA, 25 bp, Homo sapiens
gcgaaatcagcttccaggagttcct

SEQ ID NO: 16298 - DNA, 25 bp, Homo sapiens
ggagttcctgacggcggcaaggaag

SEQ ID NO: 16299 - DNA, 25 bp, Homo sapiens
aagaaccgtcaggaattcccatctc

SEQ ID NO: 16300 - DNA, 25 bp, Homo sapiens
aatggaactcccatagtcatctgcc

SEQ ID NO: 16301 - DNA, 25 bp, Homo sapiens
aggccctacattgagtatccgtcct

SEQ ID NO: 16302 - DNA, 25 bp, Homo sapiens
gacattacatttagtttgctctcac

SEQ ID NO: 16303 - DNA, 25 bp, Homo sapiens
gagacaagcaacagtgagtcctcct

SEQ ID NO: 16304 - DNA, 25 bp, Homo sapiens
gagtcaggtgtcatggctgccctga

SEQ ID NO: 16305 - DNA, 25 bp, Homo sapiens
gctctcactccatctggctaagtga

SEQ ID NO: 16306 - DNA, 25 bp, Homo sapiens
ggatgaatcacatcccacattcttc

SEQ ID NO: 16307 - DNA, 25 bp, Homo sapiens
tgatcttgaaataccacctctcagg

SEQ ID NO: 16308 - DNA, 25 bp, Homo sapiens
tgcccagtcacccaggaatcagaga

SEQ ID NO: 16309 - DNA, 25 bp, Homo sapiens
ttggcaaagggcctctgcaatccca

SEQ ID NO: 16310 - DNA, 25 bp, Homo sapiens
accgtgctcctatgtaacagctggg

SEQ ID NO: 16311 - DNA, 25 bp, Homo sapiens
agaggagacactttggcgttcttca

SEQ ID NO: 16312 - DNA, 25 bp, Homo sapiens
aggtattgaatttccaccgtgctcc

SEQ ID NO: 16313 - DNA, 25 bp, Homo sapiens
gaattcttccagattgtttccagct

SEQ ID NO: 16314 - DNA, 25 bp, Homo sapiens
gacaaacttttcctgagatgttatt

SEQ ID NO: 16315 - DNA, 25 bp, Homo sapiens
ggaactttagcaaactgtggcaatg

SEQ ID NO: 16316 - DNA, 25 bp, Homo sapiens
ggctgcgaaaaatccaagtctctac

SEQ ID NO: 16317 - DNA, 25 bp, Homo sapiens
gtaagctgtctgctaatagagtcag

SEQ ID NO: 16318 - DNA, 25 bp, Homo sapiens
tagtagtgacacttgggaccaaata

SEQ ID NO: 16319 - DNA, 25 bp, Homo sapiens
tatcttgtaaattcgtattccctat

SEQ ID NO: 16320 - DNA, 25 bp, Homo sapiens
tttattttcagccaggaactttagc

SEQ ID NO: 16321 - DNA, 25 bp, Homo sapiens
aagtgtttatcttagttcagaaata

SEQ ID NO: 16322 - DNA, 25 bp, Homo sapiens
atatgagtaacaactttgcttaagt

SEQ ID NO: 16323 - DNA, 25 bp, Homo sapiens
atggataaggcttgctatgatttgc

SEQ ID NO: 16324 - DNA, 25 bp, Homo sapiens
atttctgcattgttgttccagagaa

SEQ ID NO: 16325 - DNA, 25 bp, Homo sapiens
gaatttatttctactgaactctata

SEQ ID NO: 16326 - DNA, 25 bp, Homo sapiens
gagaaattcattttgtagagctatg

SEQ ID NO: 16327 - DNA, 25 bp, Homo sapiens
gatattggcacactgagaaattcat

SEQ ID NO: 16328 - DNA, 25 bp, Homo sapiens
gtagagctatggataaggcttgcta

SEQ ID NO: 16329 - DNA, 25 bp, Homo sapiens
tcaaagccatggtcatctggtgatg

SEQ ID NO: 16330 - DNA, 25 bp, Homo sapiens
tgatatgtgcatttcctcatttaaa

SEQ ID NO: 16331 - DNA, 25 bp, Homo sapiens
ttgagattgaagcactaattccaaa

SEQ ID NO: 16332 - DNA, 25 bp, Homo sapiens
aacatgctgatccacggactacagt

SEQ ID NO: 16333 - DNA, 25 bp, Homo sapiens
agcctgcaaatttctctgcttgatg

SEQ ID NO: 16334 - DNA, 25 bp, Homo sapiens
ataaagtcctgcctgagttggttca

SEQ ID NO: 16335 - DNA, 25 bp, Homo sapiens
ctccccattcaaggtcttctggaca

SEQ ID NO: 16336 - DNA, 25 bp, Homo sapiens
gaagatgacacagttgccttctctc

SEQ ID NO: 16337 - DNA, 25 bp, Homo sapiens
gcttggacatcaccctggtgcatga

SEQ ID NO: 16338 - DNA, 25 bp, Homo sapiens
ggtcggtgcaagtctgttgaggctg

SEQ ID NO: 16339 - DNA, 25 bp, Homo sapiens
taaagctccaagtgaatacgcccct

SEQ ID NO: 16340 - DNA, 25 bp, Homo sapiens
tcagggcaacgtgtgccctctggtc

SEQ ID NO: 16341 - DNA, 25 bp, Homo sapiens
tccctctcggcataaagctccaagt

SEQ ID NO: 16342 - DNA, 25 bp, Homo sapiens
tcttctggacagcctcacagggatc

SEQ ID NO: 16343 - DNA, 25 bp, Homo sapiens
atgcctattgatttgattgtctttt

SEQ ID NO: 16344 - DNA, 25 bp, Homo sapiens
ccagcgctgcgctagagaaacccgc

SEQ ID NO: 16345 - DNA, 25 bp, Homo sapiens
cggagctcaggatgctgctccggct

SEQ ID NO: 16346 - DNA, 25 bp, Homo sapiens
cttcccaaggagacgccgtcgacag

SEQ ID NO: 16347 - DNA, 25 bp, Homo sapiens
gacgccgtcgacagcggagtagtgg

SEQ ID NO: 16348 - DNA, 25 bp, Homo sapiens
gcaggtgctcagcaaatgcctattg

SEQ ID NO: 16349 - DNA, 25 bp, Homo sapiens
gcgaattgcactttgatgttcagaa

SEQ ID NO: 16350 - DNA, 25 bp, Homo sapiens
gcgctccaacaaccggagctcagga

SEQ ID NO: 16351 - DNA, 25 bp, Homo sapiens
gtttgccccgtaaagcgaattgcac

SEQ ID NO: 16352 - DNA, 25 bp, Homo sapiens
tcagaaacccactttgttctcagcc

SEQ ID NO: 16353 - DNA, 25 bp, Homo sapiens
tttctccccggggattcgagagcca

SEQ ID NO: 16354 - DNA, 25 bp, Homo sapiens
acatggcaattcattataccctcct

SEQ ID NO: 16355 - DNA, 25 bp, Homo sapiens
agctattttctatatgtgccaatct

SEQ ID NO: 16356 - DNA, 25 bp, Homo sapiens
ctgcattttgactgcaactcatcac

SEQ ID NO: 16357 - DNA, 25 bp, Homo sapiens
gcaacggggagatgtttactgttat

SEQ ID NO: 16358 - DNA, 25 bp, Homo sapiens
ggggatgggatgcaagtctaaccac

SEQ ID NO: 16359 - DNA, 25 bp, Homo sapiens
gtctcatacacactttgaacacctg

SEQ ID NO: 16360 - DNA, 25 bp, Homo sapiens
gttttggatctcggagcattctgga

SEQ ID NO: 16361 - DNA, 25 bp, Homo sapiens
tacttcaaccaaaagcaacggggag

SEQ ID NO: 16362 - DNA, 25 bp, Homo sapiens
tgaacacctggcctgaaggtaattt

SEQ ID NO: 16363 - DNA, 25 bp, Homo sapiens
tgtggtgttacgttactggctcaaa

SEQ ID NO: 16364 - DNA, 25 bp, Homo sapiens
ttaggtgacaggtacatggcaattc

SEQ ID NO: 16365 - DNA, 25 bp, Homo sapiens
acaaataatgtacacccacctcaac

SEQ ID NO: 16366 - DNA, 25 bp, Homo sapiens
acccacctcaacatgtagtcggaaa

SEQ ID NO: 16367 - DNA, 25 bp, Homo sapiens
atacccctcttcaccaatgggaagt

SEQ ID NO: 16368 - DNA, 25 bp, Homo sapiens
attgactgtctactagcaggccaga

SEQ ID NO: 16369 - DNA, 25 bp, Homo sapiens
cattttccaggatctcagtgtgagt

SEQ ID NO: 16370 - DNA, 25 bp, Homo sapiens
gatccataagccaccaattcagcta

SEQ ID NO: 16371 - DNA, 25 bp, Homo sapiens
gcaggccagatgctgtgtttggctc

SEQ ID NO: 16372 - DNA, 25 bp, Homo sapiens
gtttctaatctgggcttccacttaa

SEQ ID NO: 16373 - DNA, 25 bp, Homo sapiens
gtttggctctgaattcccaactagc

SEQ ID NO: 16374 - DNA, 25 bp, Homo sapiens
tacccttcttgatcagagccatacc

SEQ ID NO: 16375 - DNA, 25 bp, Homo sapiens
tgaaaagagcctacccttcttgatc

SEQ ID NO: 16376 - DNA, 25 bp, Homo sapiens
agccatccagggatacacagggagc

SEQ ID NO: 16377 - DNA, 25 bp, Homo sapiens
agtagcaatgtaagcagccctgcca

SEQ ID NO: 16378 - DNA, 25 bp, Homo sapiens
atgtcttatcaacagtagcaatgta

SEQ ID NO: 16379 - DNA, 25 bp, Homo sapiens
attattttgatgtcttctgtctctg

SEQ ID NO: 16380 - DNA, 25 bp, Homo sapiens
catcaggaccacgaaaggataggga

SEQ ID NO: 16381 - DNA, 25 bp, Homo sapiens
ccgacagcaaaatgtttcctttctg

SEQ ID NO: 16382 - DNA, 25 bp, Homo sapiens
ctggcatgagcttctactatctgtg

SEQ ID NO: 16383 - DNA, 25 bp, Homo sapiens
cttctcatcaaagccatccagggat

SEQ ID NO: 16384 - DNA, 25 bp, Homo sapiens
ggcatgagcttctactatctgtgca

SEQ ID NO: 16385 - DNA, 25 bp, Homo sapiens
tgatgatccccgacagcaaaatgtt

SEQ ID NO: 16386 - DNA, 25 bp, Homo sapiens
ttgggtgccatcaaagaattatttt

SEQ ID NO: 16387 - DNA, 25 bp, Homo sapiens
aaatttaggatccctgatgacccca

SEQ ID NO: 16388 - DNA, 25 bp, Homo sapiens
aatacacatgaagaacctcaactta

SEQ ID NO: 16389 - DNA, 25 bp, Homo sapiens
acctccatttgtaaactatgttgct

SEQ ID NO: 16390 - DNA, 25 bp, Homo sapiens
atatgaatactcccaaatacttttt

SEQ ID NO: 16391 - DNA, 25 bp, Homo sapiens
caagaatctcccatgctgaactgag

SEQ ID NO: 16392 - DNA, 25 bp, Homo sapiens
gcagtgggaaattacctccatttgt

SEQ ID NO: 16393 - DNA, 25 bp, Homo sapiens
gggctgatcaggttgggttatgcaa

SEQ ID NO: 16394 - DNA, 25 bp, Homo sapiens
gggttatgcaagaatctcccatgct

SEQ ID NO: 16395 - DNA, 25 bp, Homo sapiens
ggtcatagaccacagagaagtttct

SEQ ID NO: 16396 - DNA, 25 bp, Homo sapiens
tccctgatgaccccactaattatag

SEQ ID NO: 16397 - DNA, 25 bp, Homo sapiens
ttaatcccagatttggatcctacaa

SEQ ID NO: 16398 - DNA, 25 bp, Homo sapiens
aatcaagtgatatttctgggatata

SEQ ID NO: 16399 - DNA, 25 bp, Homo sapiens
acagatggtgtgaatacattatgta

SEQ ID NO: 16400 - DNA, 25 bp, Homo sapiens
acctggctccagagattatctacag

SEQ ID NO: 16401 - DNA, 25 bp, Homo sapiens
atcgacagcactgatcatgacagat

SEQ ID NO: 16402 - DNA, 25 bp, Homo sapiens
cagctcactgaacatggcaatgtga

SEQ ID NO: 16403 - DNA, 25 bp, Homo sapiens
ctgggatatatcacttcagcacctg

SEQ ID NO: 16404 - DNA, 25 bp, Homo sapiens
gaaaagtagctctaatcaagtgata

SEQ ID NO: 16405 - DNA, 25 bp, Homo sapiens
gagattatctacagctcactgaaca

SEQ ID NO: 16406 - DNA, 25 bp, Homo sapiens
ggatatcgacagcactgatcatgac

SEQ ID NO: 16407 - DNA, 25 bp, Homo sapiens
ggcaatgtgaaggatatcgacagca

SEQ ID NO: 16408 - DNA, 25 bp, Homo sapiens
tatgtatcgagggctgatcaggttg

SEQ ID NO: 16409 - DNA, 25 bp, Homo sapiens
agttcctggtgcatcaaagctgtaa

SEQ ID NO: 16410 - DNA, 25 bp, Homo sapiens
cagtaggccagctgagcacttacca

SEQ ID NO: 16411 - DNA, 25 bp, Homo sapiens
ccaagtctccaggcaggactatcaa

SEQ ID NO: 16412 - DNA, 25 bp, Homo sapiens
ccagaggacttgcccagtaggccag

SEQ ID NO: 16413 - DNA, 25 bp, Homo sapiens
ccctatccttttctgtatcaaacaa

SEQ ID NO: 16414 - DNA, 25 bp, Homo sapiens
gacaaaaggctttcattccctcttc

SEQ ID NO: 16415 - DNA, 25 bp, Homo sapiens
gactatcaaaatggactccttcttc

SEQ ID NO: 16416 - DNA, 25 bp, Homo sapiens
gcttttgccctcagcttgaatacag

SEQ ID NO: 16417 - DNA, 25 bp, Homo sapiens
ggcaggcaggttatcagtccttggc

SEQ ID NO: 16418 - DNA, 25 bp, Homo sapiens
tcatcacctcttcctacaaataaac

SEQ ID NO: 16419 - DNA, 25 bp, Homo sapiens
tcctatcagctctagaaccccagag

SEQ ID NO: 16420 - DNA, 25 bp, Homo sapiens
aaaacttgatcctcgtccagaatac

SEQ ID NO: 16421 - DNA, 25 bp, Homo sapiens
aacccagatgacttactcaatgcct

SEQ ID NO: 16422 - DNA, 25 bp, Homo sapiens
aaggactatctcaagcaggtgctgg

SEQ ID NO: 16423 - DNA, 25 bp, Homo sapiens
ctcggccaaccatcatcaaagcaag

SEQ ID NO: 16424 - DNA, 25 bp, Homo sapiens
gacagaacagtacgtggagctccac

SEQ ID NO: 16425 - DNA, 25 bp, Homo sapiens
gattgttgatgctacctccaaagac

SEQ ID NO: 16426 - DNA, 25 bp, Homo sapiens
gcactacctgggaatcctgtatcgg

SEQ ID NO: 16427 - DNA, 25 bp, Homo sapiens
gtcacctgcaatctctttgttgtgc

SEQ ID NO: 16428 - DNA, 25 bp, Homo sapiens
gtctgatgagcatgcgcagtgccaa

SEQ ID NO: 16429 - DNA, 25 bp, Homo sapiens
gtgctggacattgatcttcatgctc

SEQ ID NO: 16430 - DNA, 25 bp, Homo sapiens
ttggcatcaccaagaaccactacct

SEQ ID NO: 16431 - DNA, 25 bp, Homo sapiens
aactccccatgatctgacatgcaga

SEQ ID NO: 16432 - DNA, 25 bp, Homo sapiens
aactctgggactgaaccactgaatt

SEQ ID NO: 16433 - DNA, 25 bp, Homo sapiens
acatgcagaaatccagccttgtcca

SEQ ID NO: 16434 - DNA, 25 bp, Homo sapiens
atggtgatccaccttgtgatggtta

SEQ ID NO: 16435 - DNA, 25 bp, Homo sapiens
caatgagagttgtcccttagcctta

SEQ ID NO: 16436 - DNA, 25 bp, Homo sapiens
cgtgtgttctgtatgggtccagctg

SEQ ID NO: 16437 - DNA, 25 bp, Homo sapiens
gagagggggctaaggggctggatcc

SEQ ID NO: 16438 - DNA, 25 bp, Homo sapiens
gcagctcacagcgggaaaactctgg

SEQ ID NO: 16439 - DNA, 25 bp, Homo sapiens
gccttgtccagaatcctcctggaat

SEQ ID NO: 16440 - DNA, 25 bp, Homo sapiens
tcacccagcgtgagctttcacatag

SEQ ID NO: 16441 - DNA, 25 bp, Homo sapiens
tgtgccagctacacgtgtgttctgt

SEQ ID NO: 16442 - DNA, 25 bp, Homo sapiens
caggagtgacacaggcagccagtac

SEQ ID NO: 16443 - DNA, 25 bp, Homo sapiens
ccttcctcatcatggttgtggtgta

SEQ ID NO: 16444 - DNA, 25 bp, Homo sapiens
gagaacccagagaggcgtccctctc

SEQ ID NO: 16445 - DNA, 25 bp, Homo sapiens
gaggaaaaccaacgtcttgtctccg

SEQ ID NO: 16446 - DNA, 25 bp, Homo sapiens
gcacttcctaaactctggatgcctc

SEQ ID NO: 16447 - DNA, 25 bp, Homo sapiens
gccggaggacacccatgaagctaat

SEQ ID NO: 16448 - DNA, 25 bp, Homo sapiens
ggagttaccttgttttctggacagt

SEQ ID NO: 16449 - DNA, 25 bp, Homo sapiens
gggcgtttgtggtatgctggacccc

SEQ ID NO: 16450 - DNA, 25 bp, Homo sapiens
gtacctgcggatctacgtgtacgtc

SEQ ID NO: 16451 - DNA, 25 bp, Homo sapiens
tctccgcatacaagtgggtccatca

SEQ ID NO: 16452 - DNA, 25 bp, Homo sapiens
tggcccccatttacagcaggagtta

SEQ ID NO: 16453 - DNA, 25 bp, Homo sapiens
aaaatgattctgcaactctcttaaa

SEQ ID NO: 16454 - DNA, 25 bp, Homo sapiens
aacaccacaaccaatatgtctgtcc

SEQ ID NO: 16455 - DNA, 25 bp, Homo sapiens
aactactcagctaatgcccctaaat

SEQ ID NO: 16456 - DNA, 25 bp, Homo sapiens
atgtctgtcctggttattccaaata

SEQ ID NO: 16457 - DNA, 25 bp, Homo sapiens
cctcccagatgcaacaactactcag

SEQ ID NO: 16458 - DNA, 25 bp, Homo sapiens
ctcttggagttcttcgtagcttgtg

SEQ ID NO: 16459 - DNA, 25 bp, Homo sapiens
cttcctacattaccactactacatg

SEQ ID NO: 16460 - DNA, 25 bp, Homo sapiens
gctggccaagactactgggccgtgc

SEQ ID NO: 16461 - DNA, 25 bp, Homo sapiens
ggcatttcagccacgctgatgatct

SEQ ID NO: 16462 - DNA, 25 bp, Homo sapiens
ggtcgctaatgatggctgtatctcc

SEQ ID NO: 16463 - DNA, 25 bp, Homo sapiens
gtatgaaagcaaccctgtgacacca

SEQ ID NO: 16464 - DNA, 25 bp, Homo sapiens
aaactgcgcacaagcttgccatgaa

SEQ ID NO: 16465 - DNA, 25 bp, Homo sapiens
aagccaggccttgaatgagcgtgga

SEQ ID NO: 16466 - DNA, 25 bp, Homo sapiens
atttccctaatgatcttgctaataa

SEQ ID NO: 16467 - DNA, 25 bp, Homo sapiens
cagaagacctgaagaacagcgccca

SEQ ID NO: 16468 - DNA, 25 bp, Homo sapiens
cagcgcccagcagtttgcagaaact

SEQ ID NO: 16469 - DNA, 25 bp, Homo sapiens
catcctccattcagctgctgacagc

SEQ ID NO: 16470 - DNA, 25 bp, Homo sapiens
ctgacagcgtgaccagcgcagtgca

SEQ ID NO: 16471 - DNA, 25 bp, Homo sapiens
gagaaactgcctatcctggtgactc

SEQ ID NO: 16472 - DNA, 25 bp, Homo sapiens
gcgtggagagcgattaggccgagca

SEQ ID NO: 16473 - DNA, 25 bp, Homo sapiens
tacaagaattcgggacctccgcttg

SEQ ID NO: 16474 - DNA, 25 bp, Homo sapiens
tatcctggtgactcttcttaagaga

SEQ ID NO: 16475 - DNA, 25 bp, Homo sapiens
acaaaccatgggtccagggagtctc

SEQ ID NO: 16476 - DNA, 25 bp, Homo sapiens
actgtaatcagtgcatccacacctc

SEQ ID NO: 16477 - DNA, 25 bp, Homo sapiens
cacacagatcgctcagggcactgag

SEQ ID NO: 16478 - DNA, 25 bp, Homo sapiens
cagtcattgtgtgtcctttgttgct

SEQ ID NO: 16479 - DNA, 25 bp, Homo sapiens
ctgctgctccatattagcttccaga

SEQ ID NO: 16480 - DNA, 25 bp, Homo sapiens
ggatggatcaacaagggtcacgggg

SEQ ID NO: 16481 - DNA, 25 bp, Homo sapiens
gggtgtgacctgcttgctagagaac

SEQ ID NO: 16482 - DNA, 25 bp, Homo sapiens
ggtcatgggtgaatgctttctgctg

SEQ ID NO: 16483 - DNA, 25 bp, Homo sapiens
gtgggatgcccagcaggcacaaacc

SEQ ID NO: 16484 - DNA, 25 bp, Homo sapiens
gttgctgccaatgtctttggactgt

SEQ ID NO: 16485 - DNA, 25 bp, Homo sapiens
tcagcggggaacttctatcagtatc

SEQ ID NO: 16486 - DNA, 25 bp, Homo sapiens
agtgcaggggggctgcatgcgttgc

SEQ ID NO: 16487 - DNA, 25 bp, Homo sapiens
catgcgttgcctcctgagatcgagg

SEQ ID NO: 16488 - DNA, 25 bp, Homo sapiens
cattgactgacggggaccagggctt

SEQ ID NO: 16489 - DNA, 25 bp, Homo sapiens
ctggcctcaatggcggactcagtca

SEQ ID NO: 16490 - DNA, 25 bp, Homo sapiens
gacacaagcaggcgccaatggtatc

SEQ ID NO: 16491 - DNA, 25 bp, Homo sapiens
gaggctgcaggatatgctcagactc

SEQ ID NO: 16492 - DNA, 25 bp, Homo sapiens
gagttggggactcagagggaccact

SEQ ID NO: 16493 - DNA, 25 bp, Homo sapiens
gctcagactctagaggcgtggacca

SEQ ID NO: 16494 - DNA, 25 bp, Homo sapiens
ggaccaaggggcatggagcttcact

SEQ ID NO: 16495 - DNA, 25 bp, Homo sapiens
gggcttgtgtgggtcgagagcgccc

SEQ ID NO: 16496 - DNA, 25 bp, Homo sapiens
ttgtgtgtaggtcccctggggacac

SEQ ID NO: 16497 - DNA, 25 bp, Homo sapiens
aacatgctggtgactaacttctgga

SEQ ID NO: 16498 - DNA, 25 bp, Homo sapiens
aatgcatccgcattggcagcatgga

SEQ ID NO: 16499 - DNA, 25 bp, Homo sapiens
actgacctccgggatcatgttcatt

SEQ ID NO: 16500 - DNA, 25 bp, Homo sapiens
aggactctgccaaagccaacatgac

SEQ ID NO: 16501 - DNA, 25 bp, Homo sapiens
gagtgtctgtgtttgccaacatgct

SEQ ID NO: 16502 - DNA, 25 bp, Homo sapiens
gtatccatctttgccctgaaatgca

SEQ ID NO: 16503 - DNA, 25 bp, Homo sapiens
gtccacagctaacatgtacaccggc

SEQ ID NO: 16504 - DNA, 25 bp, Homo sapiens
gtgcgagccctgatgatcgtaggca

SEQ ID NO: 16505 - DNA, 25 bp, Homo sapiens
gttcattgtctcaggtctttgtgca

SEQ ID NO: 16506 - DNA, 25 bp, Homo sapiens
tggaggcctcacactaattgggggt

SEQ ID NO: 16507 - DNA, 25 bp, Homo sapiens
tgggtgggatggtgcagactgttca

SEQ ID NO: 16508 - DNA, 25 bp, Homo sapiens
cactggctttgggtccaacaccaaa

SEQ ID NO: 16509 - DNA, 25 bp, Homo sapiens
ccacagtgttgcctacaagcctgga

SEQ ID NO: 16510 - DNA, 25 bp, Homo sapiens
gaggtacaatcttatccttccaagc

SEQ ID NO: 16511 - DNA, 25 bp, Homo sapiens
gatatacgatggaggtgcccgcaca

SEQ ID NO: 16512 - DNA, 25 bp, Homo sapiens
gcctggaggcttcaaggccagcact

SEQ ID NO: 16513 - DNA, 25 bp, Homo sapiens
ggacgaggtacaatcttatccttcc

SEQ ID NO: 16514 - DNA, 25 bp, Homo sapiens
ggcttcaaggccagcactggctttg

SEQ ID NO: 16515 - DNA, 25 bp, Homo sapiens
gtgcccgcacagaggacgaggtaca

SEQ ID NO: 16516 - DNA, 25 bp, Homo sapiens
gtgttgcctacaagcctggaggctt

SEQ ID NO: 16517 - DNA, 25 bp, Homo sapiens
tacaaagccgtttcttatcatgcct

SEQ ID NO: 16518 - DNA, 25 bp, Homo sapiens
tacaatcttatccttccaagcacga

SEQ ID NO: 16519 - DNA, 25 bp, Homo sapiens
agacacttggcacaaaacctggcac

SEQ ID NO: 16520 - DNA, 25 bp, Homo sapiens
atctcaatctggggtcggtggttaa

SEQ ID NO: 16521 - DNA, 25 bp, Homo sapiens
ccagggaggtggtgtcactgcacag

SEQ ID NO: 16522 - DNA, 25 bp, Homo sapiens
ccctgatggcgcttacattccagtg

SEQ ID NO: 16523 - DNA, 25 bp, Homo sapiens
cttgtgctgctgcctagacagtagg

SEQ ID NO: 16524 - DNA, 25 bp, Homo sapiens
gaccttacaccagtcacttaacttg

SEQ ID NO: 16525 - DNA, 25 bp, Homo sapiens
gcccatccatgcacattacttagct

SEQ ID NO: 16526 - DNA, 25 bp, Homo sapiens
gctgctgagcaggggtgggacatga

SEQ ID NO: 16527 - DNA, 25 bp, Homo sapiens
tcacagcagacagggtcgctgccct

SEQ ID NO: 16528 - DNA, 25 bp, Homo sapiens
ttagggagactcgtaaggccaggcc

SEQ ID NO: 16529 - DNA, 25 bp, Homo sapiens
ttgttagccatccattatcgcatct

SEQ ID NO: 16530 - DNA, 25 bp, Homo sapiens
acatgtaccgtggcctggtatatga

SEQ ID NO: 16531 - DNA, 25 bp, Homo sapiens
agggtgccttctgaatactgttatt

SEQ ID NO: 16532 - DNA, 25 bp, Homo sapiens
ccctgcgtgcaaacatgtaccgtgg

SEQ ID NO: 16533 - DNA, 25 bp, Homo sapiens
ctaggtagatgcactgctcacctgc

SEQ ID NO: 16534 - DNA, 25 bp, Homo sapiens
ctccgcacctcagcagtttggggtg

SEQ ID NO: 16535 - DNA, 25 bp, Homo sapiens
gtgcctttactgttgtgtggactgc

SEQ ID NO: 16536 - DNA, 25 bp, Homo sapiens
tcacctgtgtcccatagggtgcctt

SEQ ID NO: 16537 - DNA, 25 bp, Homo sapiens
tctgacctgctttgcagacgtgcct

SEQ ID NO: 16538 - DNA, 25 bp, Homo sapiens
tgtgggcaggatacttttccatggc

SEQ ID NO: 16539 - DNA, 25 bp, Homo sapiens
tgttgcagaacgtgaccctgcgtgc

SEQ ID NO: 16540 - DNA, 25 bp, Homo sapiens
tttttatctccacacgcagtatgaa

SEQ ID NO: 16541 - DNA, 25 bp, Homo sapiens
aactcaaggacattgcaaccctgcc

SEQ ID NO: 16542 - DNA, 25 bp, Homo sapiens
aaggacagagtcctgggtggggcag

SEQ ID NO: 16543 - DNA, 25 bp, Homo sapiens
acattgagcctccaggcaccatgtt

SEQ ID NO: 16544 - DNA, 25 bp, Homo sapiens
agtgaagccatcctatttgtttccg

SEQ ID NO: 16545 - DNA, 25 bp, Homo sapiens
ccagggcggtagaacttcagggtga

SEQ ID NO: 16546 - DNA, 25 bp, Homo sapiens
cccggcgcagatctgattttcacat

SEQ ID NO: 16547 - DNA, 25 bp, Homo sapiens
ctctgcttttggtgtttgtacatgt

SEQ ID NO: 16548 - DNA, 25 bp, Homo sapiens
gaggcctccaggtaaagcctagagg

SEQ ID NO: 16549 - DNA, 25 bp, Homo sapiens
gagtaccagtggtgttgcttccacc

SEQ ID NO: 16550 - DNA, 25 bp, Homo sapiens
gccaaagaactttccaggtcagccg

SEQ ID NO: 16551 - DNA, 25 bp, Homo sapiens
tttcacatctctacctggacattga

SEQ ID NO: 16552 - DNA, 25 bp, Homo sapiens
aagttctgccactaatgaacccaga

SEQ ID NO: 16553 - DNA, 25 bp, Homo sapiens
aatgcttgaggcttatcacctgcca

SEQ ID NO: 16554 - DNA, 25 bp, Homo sapiens
agctcagcaaacatcaggacacttc

SEQ ID NO: 16555 - DNA, 25 bp, Homo sapiens
agctgcagccagtgtatgtcaatgt

SEQ ID NO: 16556 - DNA, 25 bp, Homo sapiens
caaggactcccaagtcatctactct

SEQ ID NO: 16557 - DNA, 25 bp, Homo sapiens
gaacgtgcctcaggaggcacctcct

SEQ ID NO: 16558 - DNA, 25 bp, Homo sapiens
ggatggggcatcattaagacttgct

SEQ ID NO: 16559 - DNA, 25 bp, Homo sapiens
ggatgtggtttattctcaggtctgg

SEQ ID NO: 16560 - DNA, 25 bp, Homo sapiens
gtcaatgtgggctctgtagatgtgg

SEQ ID NO: 16561 - DNA, 25 bp, Homo sapiens
tcaagagttcacctattcaagccca

SEQ ID NO: 16562 - DNA, 25 bp, Homo sapiens
tgaactgctgctacatccagacact

SEQ ID NO: 16563 - DNA, 25 bp, Homo sapiens
aactcttaggtttactgctacatcc

SEQ ID NO: 16564 - DNA, 25 bp, Homo sapiens
ataaactgtgcatgtgtttccactt

SEQ ID NO: 16565 - DNA, 25 bp, Homo sapiens
catcaggagaggtctcgttcgtctc

SEQ ID NO: 16566 - DNA, 25 bp, Homo sapiens
cgttcgtctccagctcataaaatgt

SEQ ID NO: 16567 - DNA, 25 bp, Homo sapiens
ggacttcctcattctttgtggtagt

SEQ ID NO: 16568 - DNA, 25 bp, Homo sapiens
gtagcagcatcatccttgacagtga

SEQ ID NO: 16569 - DNA, 25 bp, Homo sapiens
gtttttcaggccctccattgagaac

SEQ ID NO: 16570 - DNA, 25 bp, Homo sapiens
taactgttgtctgtgcctttttgaa

SEQ ID NO: 16571 - DNA, 25 bp, Homo sapiens
tacacttggggtggcctaataccta

SEQ ID NO: 16572 - DNA, 25 bp, Homo sapiens
ttacagatgtctgctgacctcacaa

SEQ ID NO: 16573 - DNA, 25 bp, Homo sapiens
ttccacttccgtttctagtactatt

SEQ ID NO: 16574 - DNA, 25 bp, Homo sapiens
acgggtgctggctatgttcaagatc

SEQ ID NO: 16575 - DNA, 25 bp, Homo sapiens
agatcagctgtgacaaggacttgca

SEQ ID NO: 16576 - DNA, 25 bp, Homo sapiens
atcccatcatctatggtgccaaaac

SEQ ID NO: 16577 - DNA, 25 bp, Homo sapiens
cgctttggaaacagccttcatccca

SEQ ID NO: 16578 - DNA, 25 bp, Homo sapiens
gatcagaacacgggtgctggctatg

SEQ ID NO: 16579 - DNA, 25 bp, Homo sapiens
gccaaaaccaaacagatcagaacac

SEQ ID NO: 16580 - DNA, 25 bp, Homo sapiens
ggtcatgggcgtggacgtaatgttc

SEQ ID NO: 16581 - DNA, 25 bp, Homo sapiens
gtcatgggtgacatctacctgctgc

SEQ ID NO: 16582 - DNA, 25 bp, Homo sapiens
tctcagttgtacaccgctttggaaa

SEQ ID NO: 16583 - DNA, 25 bp, Homo sapiens
tgccacttattggcctctcagttgt

SEQ ID NO: 16584 - DNA, 25 bp, Homo sapiens
ttcatcccattgtgcgtgttgtcat

SEQ ID NO: 16585 - DNA, 25 bp, Homo sapiens
atatctgggtcttttcgtcagtttg

SEQ ID NO: 16586 - DNA, 25 bp, Homo sapiens
atgaagtcctgtgaggccttcctat

SEQ ID NO: 16587 - DNA, 25 bp, Homo sapiens
caacgttaaactcttagcctacaag

SEQ ID NO: 16588 - DNA, 25 bp, Homo sapiens
cagtttggtgcatttgctgctgctg

SEQ ID NO: 16589 - DNA, 25 bp, Homo sapiens
gaacgaaagcatttaactggccagt

SEQ ID NO: 16590 - DNA, 25 bp, Homo sapiens
gcctacaaggtggctcttatgtaca

SEQ ID NO: 16591 - DNA, 25 bp, Homo sapiens
gcttggtacaagcttatgctgtctt

SEQ ID NO: 16592 - DNA, 25 bp, Homo sapiens
ggcttaaaccaagaccttgtctaga

SEQ ID NO: 16593 - DNA, 25 bp, Homo sapiens
gttacaatgcttatgcttggtacaa

SEQ ID NO: 16594 - DNA, 25 bp, Homo sapiens
gttgctactgtttgcctcaaacgct

SEQ ID NO: 16595 - DNA, 25 bp, Homo sapiens
gtttgttgccaaggtagcactgtga

SEQ ID NO: 16596 - DNA, 25 bp, Homo sapiens
ccacctgcgcaatagcccagaagat

SEQ ID NO: 16597 - DNA, 25 bp, Homo sapiens
cccttccttccgaatgatcagcagt

SEQ ID NO: 16598 - DNA, 25 bp, Homo sapiens
ctcctcttcgtgaacaccagcagat

SEQ ID NO: 16599 - DNA, 25 bp, Homo sapiens
cttcgtgaacaccagcagatacctc

SEQ ID NO: 16600 - DNA, 25 bp, Homo sapiens
gatcatactgggcaggcgttggcgt

SEQ ID NO: 16601 - DNA, 25 bp, Homo sapiens
ggacatttaaagcaccagccatcgt

SEQ ID NO: 16602 - DNA, 25 bp, Homo sapiens
gtgcctccactgatgcaggagctgc

SEQ ID NO: 16603 - DNA, 25 bp, Homo sapiens
taaagcaccagccatcgtgtggagc

SEQ ID NO: 16604 - DNA, 25 bp, Homo sapiens
taagcgggcgggcggtgaagagtca

SEQ ID NO: 16605 - DNA, 25 bp, Homo sapiens
tcgtgtggagcactaccaaggggcc

SEQ ID NO: 16606 - DNA, 25 bp, Homo sapiens
tgatgtgcttgggaaagctccctcc

SEQ ID NO: 16607 - DNA, 25 bp, Homo sapiens
aaagaccgtgagttattgcccagca

SEQ ID NO: 16608 - DNA, 25 bp, Homo sapiens
aagaaggccaatctctcatttgacc

SEQ ID NO: 16609 - DNA, 25 bp, Homo sapiens
agcatctgcagattcgcagcctctt

SEQ ID NO: 16610 - DNA, 25 bp, Homo sapiens
agttgcgtctgtagtagccgcttgc

SEQ ID NO: 16611 - DNA, 25 bp, Homo sapiens
atctgcctgttttaaaagttgcgtc

SEQ ID NO: 16612 - DNA, 25 bp, Homo sapiens
gagttagcaacatgcctgacttcct

SEQ ID NO: 16613 - DNA, 25 bp, Homo sapiens
gcctgacttcctgatagcattactg

SEQ ID NO: 16614 - DNA, 25 bp, Homo sapiens
ggcatgatgtccggtgatttctgta

SEQ ID NO: 16615 - DNA, 25 bp, Homo sapiens
gtagccgcttgctgtgaagacacat

SEQ ID NO: 16616 - DNA, 25 bp, Homo sapiens
gtggagggcagtgtcgacgctgcac

SEQ ID NO: 16617 - DNA, 25 bp, Homo sapiens
tgtcgacgctgcacagcatctgcag

SEQ ID NO: 16618 - DNA, 25 bp, Homo sapiens
caactgctggcagaatcttcgtccg

SEQ ID NO: 16619 - DNA, 25 bp, Homo sapiens
cagctacaatcccatggtgctcatt

SEQ ID NO: 16620 - DNA, 25 bp, Homo sapiens
ccgacaccggggtgtcgctccagac

SEQ ID NO: 16621 - DNA, 25 bp, Homo sapiens
cgctccagacctatgatgacttgtt

SEQ ID NO: 16622 - DNA, 25 bp, Homo sapiens
gacggcgtcaaggtcgtgggacgtg

SEQ ID NO: 16623 - DNA, 25 bp, Homo sapiens
gccagttccgggcggcaaacatgca

SEQ ID NO: 16624 - DNA, 25 bp, Homo sapiens
gtcgccacgggaggtgcaagtgacc

SEQ ID NO: 16625 - DNA, 25 bp, Homo sapiens
tgcaagtgaccatgtgcatcggcgc

SEQ ID NO: 16626 - DNA, 25 bp, Homo sapiens
tgcacgcgcagatcaagacgagcct

SEQ ID NO: 16627 - DNA, 25 bp, Homo sapiens
tgctcattcaaaagaccgacaccgg

SEQ ID NO: 16628 - DNA, 25 bp, Homo sapiens
ttgttagccaaagactgccactgca

SEQ ID NO: 16629 - DNA, 25 bp, Homo sapiens
agcctgccgccatgatggaggacag

SEQ ID NO: 16630 - DNA, 25 bp, Homo sapiens
caaggatttcacatcctgatcccga

SEQ ID NO: 16631 - DNA, 25 bp, Homo sapiens
caggctcggactgtggtgccaagga

SEQ ID NO: 16632 - DNA, 25 bp, Homo sapiens
ccaaaacaacatctacagcgcctgc

SEQ ID NO: 16633 - DNA, 25 bp, Homo sapiens
ctatctgctgatgtccaatacctgc

SEQ ID NO: 16634 - DNA, 25 bp, Homo sapiens
ctgcaggtgtctgaatctccctggc

SEQ ID NO: 16635 - DNA, 25 bp, Homo sapiens
gaaaggaggaaagccctctccaggc

SEQ ID NO: 16636 - DNA, 25 bp, Homo sapiens
ggtgccaaggagtctcatctatctg

SEQ ID NO: 16637 - DNA, 25 bp, Homo sapiens
tgactacatcaatgttcctgcctga

SEQ ID NO: 16638 - DNA, 25 bp, Homo sapiens
tgtccaatacctgcttcatgtgttc

SEQ ID NO: 16639 - DNA, 25 bp, Homo sapiens
tgtgaatacgtgagcctctaccacc

SEQ ID NO: 16640 - DNA, 25 bp, Homo sapiens
atgggtctccaatctcggatatcca

SEQ ID NO: 16641 - DNA, 25 bp, Homo sapiens
cacctattgcagccttcagggctcg

SEQ ID NO: 16642 - DNA, 25 bp, Homo sapiens
ccttaagcaactacttctgtgaagt

SEQ ID NO: 16643 - DNA, 25 bp, Homo sapiens
gagccttaagcaactacttctgtga

SEQ ID NO: 16644 - DNA, 25 bp, Homo sapiens
gatctcagggaagcctgggagtccc

SEQ ID NO: 16645 - DNA, 25 bp, Homo sapiens
gctctgggtcacctgacctgtagtc

SEQ ID NO: 16646 - DNA, 25 bp, Homo sapiens
gtaattctgcccaaggctcaactgc

SEQ ID NO: 16647 - DNA, 25 bp, Homo sapiens
tacctatgggtctccaatctcggat

SEQ ID NO: 16648 - DNA, 25 bp, Homo sapiens
tcaacctccggagtccaggagaacc

SEQ ID NO: 16649 - DNA, 25 bp, Homo sapiens
tccaatctcggatatccaccttgtg

SEQ ID NO: 16650 - DNA, 25 bp, Homo sapiens
tctcggatatccaccttgtgggtat

SEQ ID NO: 16651 - DNA, 25 bp, Homo sapiens
aaatctggaactgcctctgttgtgt

SEQ ID NO: 16652 - DNA, 25 bp, Homo sapiens
aacacaaagtctacgcctgcgaagt

SEQ ID NO: 16653 - DNA, 25 bp, Homo sapiens
acagcaaggacagcacctacagcct

SEQ ID NO: 16654 - DNA, 25 bp, Homo sapiens
ctcgcccgtcacaaagagcttcaac

SEQ ID NO: 16655 - DNA, 25 bp, Homo sapiens
gatcaaacgaactgtggctgcacca

SEQ ID NO: 16656 - DNA, 25 bp, Homo sapiens
gttagagggagaagtgcccccacct

SEQ ID NO: 16657 - DNA, 25 bp, Homo sapiens
gttatcctgtcacttttggccaggg

SEQ ID NO: 16658 - DNA, 25 bp, Homo sapiens
tccacaggggacctacccctattgc

SEQ ID NO: 16659 - DNA, 25 bp, Homo sapiens
tcctcctccttggctttaattatgc

SEQ ID NO: 16660 - DNA, 25 bp, Homo sapiens
caacaccgtgacaattggcctccgg

SEQ ID NO: 16661 - DNA, 25 bp, Homo sapiens
aacattttctgaattcccattttct

SEQ ID NO: 16662 - DNA, 25 bp, Homo sapiens
aagacctttcacagaatcctatgga

SEQ ID NO: 16663 - DNA, 25 bp, Homo sapiens
aagcagaaacatgccgccagttctc

SEQ ID NO: 16664 - DNA, 25 bp, Homo sapiens
ccaggatccatttaggtaccacttg

SEQ ID NO: 16665 - DNA, 25 bp, Homo sapiens
ctacttcatacccatgccttaaaga

SEQ ID NO: 16666 - DNA, 25 bp, Homo sapiens
gattccgatctttcccaaaggtgtt

SEQ ID NO: 16667 - DNA, 25 bp, Homo sapiens
gcagctggcccccaatgtggggagg

SEQ ID NO: 16668 - DNA, 25 bp, Homo sapiens
gcatttcacttggctacttcatacc

SEQ ID NO: 16669 - DNA, 25 bp, Homo sapiens
gtggggaggtccgaacattttctga

SEQ ID NO: 16670 - DNA, 25 bp, Homo sapiens
gttcgcggctaaatgacagtttctg

SEQ ID NO: 16671 - DNA, 25 bp, Homo sapiens
tatactgcatcctttacattagcca

SEQ ID NO: 16672 - DNA, 25 bp, Homo sapiens
aaagtcagtccattttcaagttttg

SEQ ID NO: 16673 - DNA, 25 bp, Homo sapiens
aaccatttgctgtaatccagaggca

SEQ ID NO: 16674 - DNA, 25 bp, Homo sapiens
cacgcacttcatgttcaaccatttg

SEQ ID NO: 16675 - DNA, 25 bp, Homo sapiens
cagaatgtgttgaaccaacccccac

SEQ ID NO: 16676 - DNA, 25 bp, Homo sapiens
cccctaactactgactatgactgca

SEQ ID NO: 16677 - DNA, 25 bp, Homo sapiens
ccttgagtttcacgcacttcatgtt

SEQ ID NO: 16678 - DNA, 25 bp, Homo sapiens
gaattcaggctagtgttgcagtata

SEQ ID NO: 16679 - DNA, 25 bp, Homo sapiens
gcagcctgtgaatcattctcatgcc

SEQ ID NO: 16680 - DNA, 25 bp, Homo sapiens
gcagtatagctttggcatgttcatg

SEQ ID NO: 16681 - DNA, 25 bp, Homo sapiens
ggaacagagattttttatcaccttt

SEQ ID NO: 16682 - DNA, 25 bp, Homo sapiens
ggcatgttcatgagtgagcacccag

SEQ ID NO: 16683 - DNA, 25 bp, Homo sapiens
cccaggcctgtcactttgagagggg

SEQ ID NO: 16684 - DNA, 25 bp, Homo sapiens
gattttaagtccacattggcctcac

SEQ ID NO: 16685 - DNA, 25 bp, Homo sapiens
gctgctgtgagggatcttggagctt

SEQ ID NO: 16686 - DNA, 25 bp, Homo sapiens
ggagcttgccaggcttcatgtagcc

SEQ ID NO: 16687 - DNA, 25 bp, Homo sapiens
tagccgacacacgtctcaggatttt

SEQ ID NO: 16688 - DNA, 25 bp, Homo sapiens
tcctgtgctagcggccaatgacaaa

SEQ ID NO: 16689 - DNA, 25 bp, Homo sapiens
tggggacccaagaggcagtgttgct

SEQ ID NO: 16690 - DNA, 25 bp, Homo sapiens
tgtccaccttggaatctggctgaac

SEQ ID NO: 16691 - DNA, 25 bp, Homo sapiens
ttccccttgcttcatgtttgtagag

SEQ ID NO: 16692 - DNA, 25 bp, Homo sapiens
ttggcctcacactaccagggccaat

SEQ ID NO: 16693 - DNA, 25 bp, Homo sapiens
ttgtagaggaaccttgtgccggcca

SEQ ID NO: 16694 - DNA, 25 bp, Homo sapiens
aaaatggggctagtccaggctcttc

SEQ ID NO: 16695 - DNA, 25 bp, Homo sapiens
cataggaagtgccatcttcccgggc

SEQ ID NO: 16696 - DNA, 25 bp, Homo sapiens
ggaccacctgccaggtttatctgtt

SEQ ID NO: 16697 - DNA, 25 bp, Homo sapiens
gggcatctctgctcagtgttaaggt

SEQ ID NO: 16698 - DNA, 25 bp, Homo sapiens
tacattcggtccgagtgtgtcctta

SEQ ID NO: 16699 - DNA, 25 bp, Homo sapiens
tattttgtgacactctcattcctgg

SEQ ID NO: 16700 - DNA, 25 bp, Homo sapiens
tcagggcacagcaagcgcatgacac

SEQ ID NO: 16701 - DNA, 25 bp, Homo sapiens
tccttagtttccctgtgtgcaaaat

SEQ ID NO: 16702 - DNA, 25 bp, Homo sapiens
tctgtggcccttgtgttgagtgatt

SEQ ID NO: 16703 - DNA, 25 bp, Homo sapiens
tcttcccacctcactgggacaattg

SEQ ID NO: 16704 - DNA, 25 bp, Homo sapiens
tgcctcacaaactcggggtatggtc

SEQ ID NO: 16705 - DNA, 25 bp, Homo sapiens
agaaattcttctagccatgttgatg

SEQ ID NO: 16706 - DNA, 25 bp, Homo sapiens
aggagaatgggagagcctcccctgg

SEQ ID NO: 16707 - DNA, 25 bp, Homo sapiens
agtggatgatctcttcagggaagca

SEQ ID NO: 16708 - DNA, 25 bp, Homo sapiens
catggtggccatgaggtgcctgggg

SEQ ID NO: 16709 - DNA, 25 bp, Homo sapiens
cccctgggcctgaaaacttggagca

SEQ ID NO: 16710 - DNA, 25 bp, Homo sapiens
cgacctgcggtcaaaactcacgagt

SEQ ID NO: 16711 - DNA, 25 bp, Homo sapiens
gaaaggttacgtcatggcgtccgac

SEQ ID NO: 16712 - DNA, 25 bp, Homo sapiens
gaagcagatatcgaacccaatggca

SEQ ID NO: 16713 - DNA, 25 bp, Homo sapiens
ggcaagacaacattacccaactata

SEQ ID NO: 16714 - DNA, 25 bp, Homo sapiens
gtgttcttttcacttgggagagatg

SEQ ID NO: 16715 - DNA, 25 bp, Homo sapiens
tcacccttcctggacgggactattg

SEQ ID NO: 16716 - DNA, 25 bp, Homo sapiens
aaacgacattaccttgtgcattttt

SEQ ID NO: 16717 - DNA, 25 bp, Homo sapiens
aaagcaggctgtttgctcacttctt

SEQ ID NO: 16718 - DNA, 25 bp, Homo sapiens
atgggagcccacggaactaagtagg

SEQ ID NO: 16719 - DNA, 25 bp, Homo sapiens
gactctcaaaccatacctggtgggg

SEQ ID NO: 16720 - DNA, 25 bp, Homo sapiens
gactggctgagcagtgggttccttc

SEQ ID NO: 16721 - DNA, 25 bp, Homo sapiens
gagcttctgccaaatttcattcctc

SEQ ID NO: 16722 - DNA, 25 bp, Homo sapiens
gcaggtgtccacttaactgactagc

SEQ ID NO: 16723 - DNA, 25 bp, Homo sapiens
tcaggaggggtggttggcgtttcta

SEQ ID NO: 16724 - DNA, 25 bp, Homo sapiens
tggatttcttactacctaacgccca

SEQ ID NO: 16725 - DNA, 25 bp, Homo sapiens
ttcttccctaggtcaaagccactat

SEQ ID NO: 16726 - DNA, 25 bp, Homo sapiens
tttcattcctcaaacctttcaggag

SEQ ID NO: 16727 - DNA, 25 bp, Homo sapiens
acaaatgcttccttaatgtcttcta

SEQ ID NO: 16728 - DNA, 25 bp, Homo sapiens
attctaacacactatatacttccaa

SEQ ID NO: 16729 - DNA, 25 bp, Homo sapiens
cctttcctaacatcctgaggcttaa

SEQ ID NO: 16730 - DNA, 25 bp, Homo sapiens
gaaattggccgagttcaaccattca

SEQ ID NO: 16731 - DNA, 25 bp, Homo sapiens
gagaaacggggagcaggacgacggg

SEQ ID NO: 16732 - DNA, 25 bp, Homo sapiens
gcacggcggcaagttttcaagcact

SEQ ID NO: 16733 - DNA, 25 bp, Homo sapiens
gtaggctcagcgatagtggtcctct

SEQ ID NO: 16734 - DNA, 25 bp, Homo sapiens
taaaaccctgatgcaaacttctcct

SEQ ID NO: 16735 - DNA, 25 bp, Homo sapiens
tcactgcaatgcctattccaaactt

SEQ ID NO: 16736 - DNA, 25 bp, Homo sapiens
tgttaagtgtggccaagcgcacggc

SEQ ID NO: 16737 - DNA, 25 bp, Homo sapiens
ttcaagcactgagtttctattccaa

SEQ ID NO: 16738 - DNA, 25 bp, Homo sapiens
aaaggcttactgctgcatggctgtc

SEQ ID NO: 16739 - DNA, 25 bp, Homo sapiens
agagaatggtttcccaggccagatg

SEQ ID NO: 16740 - DNA, 25 bp, Homo sapiens
cagatgggaattcgtggccttccgg

SEQ ID NO: 16741 - DNA, 25 bp, Homo sapiens
gaaacaccatccaaagctggggcaa

SEQ ID NO: 16742 - DNA, 25 bp, Homo sapiens
gaaccacgcctggtgaaggagcctg

SEQ ID NO: 16743 - DNA, 25 bp, Homo sapiens
gcatggctgtctgcatgaaccacgc

SEQ ID NO: 16744 - DNA, 25 bp, Homo sapiens
gccctccaggaagaggtcccaacgg

SEQ ID NO: 16745 - DNA, 25 bp, Homo sapiens
ggtgctattcagtaagttctctttc

SEQ ID NO: 16746 - DNA, 25 bp, Homo sapiens
ggtgctcttggtttgaggggaccta

SEQ ID NO: 16747 - DNA, 25 bp, Homo sapiens
tgcaccatgcaggctggtcagcgag

SEQ ID NO: 16748 - DNA, 25 bp, Homo sapiens
tggccgagacggtgagcgaggcccc

SEQ ID NO: 16749 - DNA, 25 bp, Homo sapiens
acggcgtgtgttgtgaaacgtgaaa

SEQ ID NO: 16750 - DNA, 25 bp, Homo sapiens
caatcagtccatagagacgaacaga

SEQ ID NO: 16751 - DNA, 25 bp, Homo sapiens
cacagcctcatgggacagaaatttg

SEQ ID NO: 16752 - DNA, 25 bp, Homo sapiens
cactgcaagctgcatcgtgcaacct

SEQ ID NO: 16753 - DNA, 25 bp, Homo sapiens
cccaaacgggaagaacacagcacac

SEQ ID NO: 16754 - DNA, 25 bp, Homo sapiens
cgggaagaacacagcacacccggct

SEQ ID NO: 16755 - DNA, 25 bp, Homo sapiens
gaaaattgccttgcagatatttagg

SEQ ID NO: 16756 - DNA, 25 bp, Homo sapiens
gaagaaacacagcctcatgggacag

SEQ ID NO: 16757 - DNA, 25 bp, Homo sapiens
gccatcccaaattcaatcagtccat

SEQ ID NO: 16758 - DNA, 25 bp, Homo sapiens
gctgcgggcactttggtagactgtg

SEQ ID NO: 16759 - DNA, 25 bp, Homo sapiens
gctggccatcccaaattcaatcagt

SEQ ID NO: 16760 - DNA, 25 bp, Homo sapiens
acccagttgaattcagccaggattt

SEQ ID NO: 16761 - DNA, 25 bp, Homo sapiens
ccaggatttattgagttggcatcac

SEQ ID NO: 16762 - DNA, 25 bp, Homo sapiens
gaaaccttcaagctctatgcagtcc

SEQ ID NO: 16763 - DNA, 25 bp, Homo sapiens
gacgtgagctctgtagagttcgcag

SEQ ID NO: 16764 - DNA, 25 bp, Homo sapiens
gatactacttgggggagggcagcta

SEQ ID NO: 16765 - DNA, 25 bp, Homo sapiens
gccagcacacccagttgaattcagc

SEQ ID NO: 16766 - DNA, 25 bp, Homo sapiens
gggagggcagctaatgaaaccttca

SEQ ID NO: 16767 - DNA, 25 bp, Homo sapiens
gtagagttcgcagaggtgggtaagt

SEQ ID NO: 16768 - DNA, 25 bp, Homo sapiens
gtgggtaagtacccagccagcacac

SEQ ID NO: 16769 - DNA, 25 bp, Homo sapiens
tatgcagtccacagacgtgagctct

SEQ ID NO: 16770 - DNA, 25 bp, Homo sapiens
tcaagctctatgcagtccacagacg

SEQ ID NO: 16771 - DNA, 25 bp, Homo sapiens
acaaaggaccagaagggcagagcca

SEQ ID NO: 16772 - DNA, 25 bp, Homo sapiens
accagccagacaaacaaaggaccag

SEQ ID NO: 16773 - DNA, 25 bp, Homo sapiens
actgagttcaaccagccagacaaac

SEQ ID NO: 16774 - DNA, 25 bp, Homo sapiens
ataaggggccttttcacatactgag

SEQ ID NO: 16775 - DNA, 25 bp, Homo sapiens
catctctcggacacacaaagataag

SEQ ID NO: 16776 - DNA, 25 bp, Homo sapiens
cttccatagccaaatcagggtcatt

SEQ ID NO: 16777 - DNA, 25 bp, Homo sapiens
gctgatgaggatcccatcgttcttc

SEQ ID NO: 16778 - DNA, 25 bp, Homo sapiens
gggtcattggactcagaactttcag

SEQ ID NO: 16779 - DNA, 25 bp, Homo sapiens
tctgcaccttccatagccaaatcag

SEQ ID NO: 16780 - DNA, 25 bp, Homo sapiens
ttcacatactgagttcaaccagcca

SEQ ID NO: 16781 - DNA, 25 bp, Homo sapiens
ttcccatccacataccaagctgatg

SEQ ID NO: 16782 - DNA, 25 bp, Homo sapiens
aacagggttttacagacactaccat

SEQ ID NO: 16783 - DNA, 25 bp, Homo sapiens
aattattcatagtgcgttttttgta

SEQ ID NO: 16784 - DNA, 25 bp, Homo sapiens
actgtatgcagttgactttactatg

SEQ ID NO: 16785 - DNA, 25 bp, Homo sapiens
atactcagttttataaggtgatact

SEQ ID NO: 16786 - DNA, 25 bp, Homo sapiens
atcaagggctgcattgtattttata

SEQ ID NO: 16787 - DNA, 25 bp, Homo sapiens
attggcgtttataaagattcttagc

SEQ ID NO: 16788 - DNA, 25 bp, Homo sapiens
gattcttagctatcaagggctgcat

SEQ ID NO: 16789 - DNA, 25 bp, Homo sapiens
gggttcacctagatcatatgagttg

SEQ ID NO: 16790 - DNA, 25 bp, Homo sapiens
gttgatgtgatacttctagaacaaa

SEQ ID NO: 16791 - DNA, 25 bp, Homo sapiens
tacagacactaccataatttataat

SEQ ID NO: 16792 - DNA, 25 bp, Homo sapiens
tttacttttgggttcacctagatca

SEQ ID NO: 16793 - DNA, 25 bp, Homo sapiens
accagtggaactgtgtacctctgtg

SEQ ID NO: 16794 - DNA, 25 bp, Homo sapiens
atgttcccattcccagaagctggaa

SEQ ID NO: 16795 - DNA, 25 bp, Homo sapiens
attcccacgcccagaaattgggcaa

SEQ ID NO: 16796 - DNA, 25 bp, Homo sapiens
cctgtgtgctgggatctaatggacc

SEQ ID NO: 16797 - DNA, 25 bp, Homo sapiens
ctccatggccttgtgacgtatgtca

SEQ ID NO: 16798 - DNA, 25 bp, Homo sapiens
gagatgtttaaactctcatccatgg

SEQ ID NO: 16799 - DNA, 25 bp, Homo sapiens
ggtttcctgtctattctcatgtaga

SEQ ID NO: 16800 - DNA, 25 bp, Homo sapiens
gtgttgggcaggtctgggcgtataa

SEQ ID NO: 16801 - DNA, 25 bp, Homo sapiens
gttacacactgcaacatgttcccat

SEQ ID NO: 16802 - DNA, 25 bp, Homo sapiens
tacctctgtgatgccaatcctgaac

SEQ ID NO: 16803 - DNA, 25 bp, Homo sapiens
tgacgtatgtcatctattcccacgc

SEQ ID NO: 16804 - DNA, 25 bp, Homo sapiens
aagtgactgccaatatatttttata

SEQ ID NO: 16805 - DNA, 25 bp, Homo sapiens
aatactgtcagtacaccagcgttta

SEQ ID NO: 16806 - DNA, 25 bp, Homo sapiens
acagtatgcatcatattgttgtctg

SEQ ID NO: 16807 - DNA, 25 bp, Homo sapiens
atccattacttattctgctgtgctt

SEQ ID NO: 16808 - DNA, 25 bp, Homo sapiens
atgggacgttttcagattggctaat

SEQ ID NO: 16809 - DNA, 25 bp, Homo sapiens
ccagcgtttaacatctatattccaa

SEQ ID NO: 16810 - DNA, 25 bp, Homo sapiens
gaatggaatgtttacaggcccttaa

SEQ ID NO: 16811 - DNA, 25 bp, Homo sapiens
gatacataccaaagtttttccaaga

SEQ ID NO: 16812 - DNA, 25 bp, Homo sapiens
gtaatgtagtgagtggtacctttat

SEQ ID NO: 16813 - DNA, 25 bp, Homo sapiens
gtgtgctcttacacagtatgcatca

SEQ ID NO: 16814 - DNA, 25 bp, Homo sapiens
tgcatctcaaagtatcatttttata

SEQ ID NO: 16815 - DNA, 25 bp, Homo sapiens
aaggtcctccagtgcttgaatatca

SEQ ID NO: 16816 - DNA, 25 bp, Homo sapiens
acagaccgggtgtctacacgaacct

SEQ ID NO: 16817 - DNA, 25 bp, Homo sapiens
agatgttccagggggtcaaatccat

SEQ ID NO: 16818 - DNA, 25 bp, Homo sapiens
catgttctgcgccggtgacaaagca

SEQ ID NO: 16819 - DNA, 25 bp, Homo sapiens
ccctctgctgggacaaagtgcttgg

SEQ ID NO: 16820 - DNA, 25 bp, Homo sapiens
cgaggatgcttacccgagacagata

SEQ ID NO: 16821 - DNA, 25 bp, Homo sapiens
ctacacgaacctctgcaagttcacc

SEQ ID NO: 16822 - DNA, 25 bp, Homo sapiens
gaaagttttcagagtccgtctcggc

SEQ ID NO: 16823 - DNA, 25 bp, Homo sapiens
gaattcgtcccactaaagatgtcag

SEQ ID NO: 16824 - DNA, 25 bp, Homo sapiens
tcctggggagattacccttgtgccc

SEQ ID NO: 16825 - DNA, 25 bp, Homo sapiens
tgcagggactcgtgtcctggggaga

SEQ ID NO: 16826 - DNA, 25 bp, Homo sapiens
aggaggacgactttgctgtctacac

SEQ ID NO: 16827 - DNA, 25 bp, Homo sapiens
attccaacgtgatcaacctggctcc

SEQ ID NO: 16828 - DNA, 25 bp, Homo sapiens
cagagtgggggtcagacctggcccc

SEQ ID NO: 16829 - DNA, 25 bp, Homo sapiens
cagctgaatcttggcataccctttg

SEQ ID NO: 16830 - DNA, 25 bp, Homo sapiens
cttttcatcaccccaggaggacatt

SEQ ID NO: 16831 - DNA, 25 bp, Homo sapiens
gaccaagtggaatatgtctccattg

SEQ ID NO: 16832 - DNA, 25 bp, Homo sapiens
gctgatgccatatattccaacgtga

SEQ ID NO: 16833 - DNA, 25 bp, Homo sapiens
ggaggacattgccagaccaagtgga

SEQ ID NO: 16834 - DNA, 25 bp, Homo sapiens
ggcataccctttgctttagatttat

SEQ ID NO: 16835 - DNA, 25 bp, Homo sapiens
gtctccattgtattccactgatggg

SEQ ID NO: 16836 - DNA, 25 bp, Homo sapiens
tgccatgctgatgccatatattcca

SEQ ID NO: 16837 - DNA, 25 bp, Homo sapiens
agtgcacacacaaaagccaccttta

SEQ ID NO: 16838 - DNA, 25 bp, Homo sapiens
attagctatagattccactggcctt

SEQ ID NO: 16839 - DNA, 25 bp, Homo sapiens
caagcctatgtaaaagtgaagtgta

SEQ ID NO: 16840 - DNA, 25 bp, Homo sapiens
cacaaaagccacctttaattattga

SEQ ID NO: 16841 - DNA, 25 bp, Homo sapiens
gaaccatgtgccaattaagctgtaa

SEQ ID NO: 16842 - DNA, 25 bp, Homo sapiens
gattccactggccttaaacatacaa

SEQ ID NO: 16843 - DNA, 25 bp, Homo sapiens
gtactatattttttgtgcatcaatg

SEQ ID NO: 16844 - DNA, 25 bp, Homo sapiens
gtgaagtgtatcttcagtgaaccat

SEQ ID NO: 16845 - DNA, 25 bp, Homo sapiens
taaaaaagtggtctagtctgtcaaa

SEQ ID NO: 16846 - DNA, 25 bp, Homo sapiens
tgtatacatgatatagtgcacacac

SEQ ID NO: 16847 - DNA, 25 bp, Homo sapiens
tttttgtgcatcaatgtatttttct

SEQ ID NO: 16848 - DNA, 25 bp, Homo sapiens
acaccacaatatgctctcttgctat

SEQ ID NO: 16849 - DNA, 25 bp, Homo sapiens
atataacctctaattgtcgcaactc

SEQ ID NO: 16850 - DNA, 25 bp, Homo sapiens
ccatattctttctacaacaccacaa

SEQ ID NO: 16851 - DNA, 25 bp, Homo sapiens
cttgctatcttgagaggctctacca

SEQ ID NO: 16852 - DNA, 25 bp, Homo sapiens
gactctgttccaggtagcttacata

SEQ ID NO: 16853 - DNA, 25 bp, Homo sapiens
gcatcatattttgtggcatctctcc

SEQ ID NO: 16854 - DNA, 25 bp, Homo sapiens
ggagccatatattcatgcacataca

SEQ ID NO: 16855 - DNA, 25 bp, Homo sapiens
gtcattgatccattcatccaggtga

SEQ ID NO: 16856 - DNA, 25 bp, Homo sapiens
taaggctgactccaaagaccatatt

SEQ ID NO: 16857 - DNA, 25 bp, Homo sapiens
tcccgtgccactatgcatctagaac

SEQ ID NO: 16858 - DNA, 25 bp, Homo sapiens
tggacaacattatcactatttcgta

SEQ ID NO: 16859 - DNA, 25 bp, Homo sapiens
actgagatctagggcttgtgcagca

SEQ ID NO: 16860 - DNA, 25 bp, Homo sapiens
agcattctacttgctgtcctgtagg

SEQ ID NO: 16861 - DNA, 25 bp, Homo sapiens
atctgcctctaaccagggttctatc

SEQ ID NO: 16862 - DNA, 25 bp, Homo sapiens
cccaatgccttgttttgtctttgga

SEQ ID NO: 16863 - DNA, 25 bp, Homo sapiens
cctgtagggacagcccaatgccttg

SEQ ID NO: 16864 - DNA, 25 bp, Homo sapiens
gggggtcagatctggaggaaatgcc

SEQ ID NO: 16865 - DNA, 25 bp, Homo sapiens
ggttctatctctaaaggatctttcc

SEQ ID NO: 16866 - DNA, 25 bp, Homo sapiens
gtgcagcaagaactcagcattctac

SEQ ID NO: 16867 - DNA, 25 bp, Homo sapiens
gtggtgggagaaggcgggggtcaga

SEQ ID NO: 16868 - DNA, 25 bp, Homo sapiens
tccttacttagaccccacacaaagg

SEQ ID NO: 16869 - DNA, 25 bp, Homo sapiens
tttgtctttggaagtccctggtgcc

SEQ ID NO: 16870 - DNA, 25 bp, Homo sapiens
aaatctcaggtttatctgggctcta

SEQ ID NO: 16871 - DNA, 25 bp, Homo sapiens
aacatgccacaggagaattcgggga

SEQ ID NO: 16872 - DNA, 25 bp, Homo sapiens
aatcctggtctttcttggtaaacag

SEQ ID NO: 16873 - DNA, 25 bp, Homo sapiens
aattcggggatttgagtttctctga

SEQ ID NO: 16874 - DNA, 25 bp, Homo sapiens
atgacttgcttttctaaatctcagg

SEQ ID NO: 16875 - DNA, 25 bp, Homo sapiens
atgatgcatcggataggtcattatg

SEQ ID NO: 16876 - DNA, 25 bp, Homo sapiens
caggtttatctgggctctatcatat

SEQ ID NO: 16877 - DNA, 25 bp, Homo sapiens
gacaggcttctgatagtttgcaact

SEQ ID NO: 16878 - DNA, 25 bp, Homo sapiens
ggactgggtctaatttatcatgact

SEQ ID NO: 16879 - DNA, 25 bp, Homo sapiens
gtgccactaaaacagcctcaggaga

SEQ ID NO: 16880 - DNA, 25 bp, Homo sapiens
tgattttttaccatttcgacttaca

SEQ ID NO: 16881 - DNA, 25 bp, Homo sapiens
aacgaccagattgaagtttgacttt

SEQ ID NO: 16882 - DNA, 25 bp, Homo sapiens
aactgcagcccatgacacaagatct

SEQ ID NO: 16883 - DNA, 25 bp, Homo sapiens
caggcacaagaactgtccatgaaga

SEQ ID NO: 16884 - DNA, 25 bp, Homo sapiens
ccagaatgctttgtttttaccagat

SEQ ID NO: 16885 - DNA, 25 bp, Homo sapiens
cctacctcattgttcttaatgcatt

SEQ ID NO: 16886 - DNA, 25 bp, Homo sapiens
gacacaagatctcattgttcctcga

SEQ ID NO: 16887 - DNA, 25 bp, Homo sapiens
gaggttgatggggcaactgcagccc

SEQ ID NO: 16888 - DNA, 25 bp, Homo sapiens
gatctcattgttcctcgatgtagag

SEQ ID NO: 16889 - DNA, 25 bp, Homo sapiens
gccttaaggctgatgcagtttactt

SEQ ID NO: 16890 - DNA, 25 bp, Homo sapiens
ttattgtcacaaatcagcaggcaca

SEQ ID NO: 16891 - DNA, 25 bp, Homo sapiens
tttttaccagattcaccattagagg

SEQ ID NO: 16892 - DNA, 25 bp, Homo sapiens
aatgcaatgcactaaaactatttta

SEQ ID NO: 16893 - DNA, 25 bp, Homo sapiens
aatgtagttaattctgcttattcat

SEQ ID NO: 16894 - DNA, 25 bp, Homo sapiens
aattctgcttattcataaagtgggc

SEQ ID NO: 16895 - DNA, 25 bp, Homo sapiens
agaggggttggtagcagacaggtgg

SEQ ID NO: 16896 - DNA, 25 bp, Homo sapiens
cagtgttgcaggaaccttttcttgg

SEQ ID NO: 16897 - DNA, 25 bp, Homo sapiens
gcagacaggtggttacattagaata

SEQ ID NO: 16898 - DNA, 25 bp, Homo sapiens
gggcatcttctgtgttttaggtgta

SEQ ID NO: 16899 - DNA, 25 bp, Homo sapiens
gtcacacaaactgttcagtgttgca

SEQ ID NO: 16900 - DNA, 25 bp, Homo sapiens
taaaccaattttactttatgaatat

SEQ ID NO: 16901 - DNA, 25 bp, Homo sapiens
tgttgcaggaaccttttcttggggg

SEQ ID NO: 16902 - DNA, 25 bp, Homo sapiens
ttttaggtgtaatatcgaagtcctg

SEQ ID NO: 16903 - DNA, 25 bp, Homo sapiens
aagcttggggtgaagggctcctttg

SEQ ID NO: 16904 - DNA, 25 bp, Homo sapiens
aatgggctcttgacaccaacattga

SEQ ID NO: 16905 - DNA, 25 bp, Homo sapiens
acggggagagcttacggtcatcctt

SEQ ID NO: 16906 - DNA, 25 bp, Homo sapiens
caggagacattggtcgctggctccc

SEQ ID NO: 16907 - DNA, 25 bp, Homo sapiens
cccactgtgcactgcttgtgagaaa

SEQ ID NO: 16908 - DNA, 25 bp, Homo sapiens
gaacaggtcaaagccatttttcttc

SEQ ID NO: 16909 - DNA, 25 bp, Homo sapiens
gaacattttcaagctggcccaagga

SEQ ID NO: 16910 - DNA, 25 bp, Homo sapiens
gagagctttccaaatactttcggac

SEQ ID NO: 16911 - DNA, 25 bp, Homo sapiens
tccctcatttgcagccaagcttggg

SEQ ID NO: 16912 - DNA, 25 bp, Homo sapiens
ttcctgacacagatgtacttccctc

SEQ ID NO: 16913 - DNA, 25 bp, Homo sapiens
ttgacagcctgtatgagcacatcca

SEQ ID NO: 16914 - DNA, 25 bp, Homo sapiens
aagccagtggacgtggccgatgctt

SEQ ID NO: 16915 - DNA, 25 bp, Homo sapiens
aggtgcctgctctgtaaatatcaag

SEQ ID NO: 16916 - DNA, 25 bp, Homo sapiens
ccaggtccagcagtgttaccatctg

SEQ ID NO: 16917 - DNA, 25 bp, Homo sapiens
cccagaccagaacgggcatggcctg

SEQ ID NO: 16918 - DNA, 25 bp, Homo sapiens
gagccccatctggcgctaaggggaa

SEQ ID NO: 16919 - DNA, 25 bp, Homo sapiens
gcagccacatgagaattcagtccac

SEQ ID NO: 16920 - DNA, 25 bp, Homo sapiens
gcaggcaccatgaactatgttaaca

SEQ ID NO: 16921 - DNA, 25 bp, Homo sapiens
gtactacagaaagggctgcagccac

SEQ ID NO: 16922 - DNA, 25 bp, Homo sapiens
gttaacaaccccagtctgtactaca

SEQ ID NO: 16923 - DNA, 25 bp, Homo sapiens
taaggggaactgctggggtgtgggt

SEQ ID NO: 16924 - DNA, 25 bp, Homo sapiens
tgctggggctgtgacttatcccctc

SEQ ID NO: 16925 - DNA, 25 bp, Homo sapiens
atctgccagcctctctgaatggaag

SEQ ID NO: 16926 - DNA, 25 bp, Homo sapiens
ccccgccctgactattagaatcata

SEQ ID NO: 16927 - DNA, 25 bp, Homo sapiens
gaagggagcgtctttcctaaggtca

SEQ ID NO: 16928 - DNA, 25 bp, Homo sapiens
gacaaatttcagctgatcctcacta

SEQ ID NO: 16929 - DNA, 25 bp, Homo sapiens
gacagccagatgcaaaatccctatt

SEQ ID NO: 16930 - DNA, 25 bp, Homo sapiens
gatcctcactattgtgggcaccatc

SEQ ID NO: 16931 - DNA, 25 bp, Homo sapiens
gcaccagtaaagatctggcctccgg

SEQ ID NO: 16932 - DNA, 25 bp, Homo sapiens
taagaatgtggaacccgccatggcc

SEQ ID NO: 16933 - DNA, 25 bp, Homo sapiens
taaggtcaggataacggcctccaga

SEQ ID NO: 16934 - DNA, 25 bp, Homo sapiens
tcgacaggcttcaccaatcttggag

SEQ ID NO: 16935 - DNA, 25 bp, Homo sapiens
tgtttgcaacgaatccagctcactt

SEQ ID NO: 16936 - DNA, 25 bp, Homo sapiens
aagaaagttcagcccttctctgact

SEQ ID NO: 16937 - DNA, 25 bp, Homo sapiens
acgttttagtctgtcaggctcacct

SEQ ID NO: 16938 - DNA, 25 bp, Homo sapiens
agacgctgtggggttccttgaagtt

SEQ ID NO: 16939 - DNA, 25 bp, Homo sapiens
agtttcttgggttcacagaggagcc

SEQ ID NO: 16940 - DNA, 25 bp, Homo sapiens
caaagacactctggtcctcgtatag

SEQ ID NO: 16941 - DNA, 25 bp, Homo sapiens
cctctttatctctcattacactgga

SEQ ID NO: 16942 - DNA, 25 bp, Homo sapiens
gaccctctgggaatccatagcttcc

SEQ ID NO: 16943 - DNA, 25 bp, Homo sapiens
gatacttccaaaggaccctctggga

SEQ ID NO: 16944 - DNA, 25 bp, Homo sapiens
gttatttctgctgtatcatccgtgc

SEQ ID NO: 16945 - DNA, 25 bp, Homo sapiens
tcatccgtgctcaacgttttagtct

SEQ ID NO: 16946 - DNA, 25 bp, Homo sapiens
tgtccagtgctttgagattcttccc

SEQ ID NO: 16947 - DNA, 25 bp, Homo sapiens
aacccaccaaaaactaggctgcatt

SEQ ID NO: 16948 - DNA, 25 bp, Homo sapiens
atggatacccttatcatgcatctct

SEQ ID NO: 16949 - DNA, 25 bp, Homo sapiens
cagcctgagggctgcattgctgtgg

SEQ ID NO: 16950 - DNA, 25 bp, Homo sapiens
cgagactgcaccaactcggatcatc

SEQ ID NO: 16951 - DNA, 25 bp, Homo sapiens
ctaagcagtgaccagaacccaccaa

SEQ ID NO: 16952 - DNA, 25 bp, Homo sapiens
gaaatacgctataacacccaccagc

SEQ ID NO: 16953 - DNA, 25 bp, Homo sapiens
gaagcctcgtgtatcaaggagccca

SEQ ID NO: 16954 - DNA, 25 bp, Homo sapiens
gagtcgagtgacagtttcgttccac

SEQ ID NO: 16955 - DNA, 25 bp, Homo sapiens
gcatctctgcgaagaaactgcccca

SEQ ID NO: 16956 - DNA, 25 bp, Homo sapiens
ggactctgcccaacaaagacttagc

SEQ ID NO: 16957 - DNA, 25 bp, Homo sapiens
ttcgttccactcttacgagactgca

SEQ ID NO: 16958 - DNA, 25 bp, Homo sapiens
aaataaggatacccctcagggctca

SEQ ID NO: 16959 - DNA, 25 bp, Homo sapiens
attttgcatagctttccagttccct

SEQ ID NO: 16960 - DNA, 25 bp, Homo sapiens
catgcttgtggccaatgcatccaaa

SEQ ID NO: 16961 - DNA, 25 bp, Homo sapiens
cctattccagtgtccatgttggcct

SEQ ID NO: 16962 - DNA, 25 bp, Homo sapiens
cggggtcacttgcaattgttaatca

SEQ ID NO: 16963 - DNA, 25 bp, Homo sapiens
gattgaacactgcgtaggagaggga

SEQ ID NO: 16964 - DNA, 25 bp, Homo sapiens
gccagcacctggttgatgtgtattc

SEQ ID NO: 16965 - DNA, 25 bp, Homo sapiens
ggattgttaacatgcctgggattgg

SEQ ID NO: 16966 - DNA, 25 bp, Homo sapiens
tcagggctcagctagacattgcaat

SEQ ID NO: 16967 - DNA, 25 bp, Homo sapiens
tccagtccttaatgtcaccatgctt

SEQ ID NO: 16968 - DNA, 25 bp, Homo sapiens
tttgcttgtcttcttgactgtcttc

SEQ ID NO: 16969 - DNA, 25 bp, Homo sapiens
aaggagccaaatgagcggtcagccc

SEQ ID NO: 16970 - DNA, 25 bp, Homo sapiens
aggaaagctttaccttctctgagtg

SEQ ID NO: 16971 - DNA, 25 bp, Homo sapiens
agggtctctggttgcactgaatgca

SEQ ID NO: 16972 - DNA, 25 bp, Homo sapiens
caccagggaaccacgtcttggagtg

SEQ ID NO: 16973 - DNA, 25 bp, Homo sapiens
cagagcatccttgcttgggctagga

SEQ ID NO: 16974 - DNA, 25 bp, Homo sapiens
cttgcccgggagcttctagatagaa

SEQ ID NO: 16975 - DNA, 25 bp, Homo sapiens
gcagctctcaaactggtcttgtact

SEQ ID NO: 16976 - DNA, 25 bp, Homo sapiens
gcctccgcctgagagatgtgtgacc

SEQ ID NO: 16977 - DNA, 25 bp, Homo sapiens
gcgaaggggctcatggcaagtggca

SEQ ID NO: 16978 - DNA, 25 bp, Homo sapiens
gggtcatgggccttgggcagatgtc

SEQ ID NO: 16979 - DNA, 25 bp, Homo sapiens
tggtgcagtgcacaccatctctatc

SEQ ID NO: 16980 - DNA, 25 bp, Homo sapiens
aaaacactactgcaatcacgtcttt

SEQ ID NO: 16981 - DNA, 25 bp, Homo sapiens
attttatcacgcatcagagccttcg

SEQ ID NO: 16982 - DNA, 25 bp, Homo sapiens
gaaatgcagttctcatcttcctgtt

SEQ ID NO: 16983 - DNA, 25 bp, Homo sapiens
gcatcagagccttcgtgctttgatt

SEQ ID NO: 16984 - DNA, 25 bp, Homo sapiens
gccttcgtgctttgattatcttgta

SEQ ID NO: 16985 - DNA, 25 bp, Homo sapiens
gctagtatcagtcagatgcacttag

SEQ ID NO: 16986 - DNA, 25 bp, Homo sapiens
ggaactaaattgctggttttctaag

SEQ ID NO: 16987 - DNA, 25 bp, Homo sapiens
ggaactagactaggtcattcgtgta

SEQ ID NO: 16988 - DNA, 25 bp, Homo sapiens
ggcaggggaacattttgtacacatt

SEQ ID NO: 16989 - DNA, 25 bp, Homo sapiens
gtcacgggtatctttaggttcaggg

SEQ ID NO: 16990 - DNA, 25 bp, Homo sapiens
ttgcaagtattgcgtaccaagtgat

SEQ ID NO: 16991 - DNA, 25 bp, Homo sapiens
cctgggggactgctgggaggaggcg

SEQ ID NO: 16992 - DNA, 25 bp, Homo sapiens
cgcgagaggaggagccggagcgctg

SEQ ID NO: 16993 - DNA, 25 bp, Homo sapiens
cggagtataggaggtgccttccgcc

SEQ ID NO: 16994 - DNA, 25 bp, Homo sapiens
gaggctgggaaaggtcaggagtcgt

SEQ ID NO: 16995 - DNA, 25 bp, Homo sapiens
gagggcggtcgcgagaggaggagcc

SEQ ID NO: 16996 - DNA, 25 bp, Homo sapiens
gcccaggcggagtcggagtatagga

SEQ ID NO: 16997 - DNA, 25 bp, Homo sapiens
ggcacggagaggctgggtcaggccg

SEQ ID NO: 16998 - DNA, 25 bp, Homo sapiens
gtcaggccgagggtgaggggcgggt

SEQ ID NO: 16999 - DNA, 25 bp, Homo sapiens
gttcctcagcggaccgaggaggctg

SEQ ID NO: 17000 - DNA, 25 bp, Homo sapiens
tcaggagtcgttttttttccaactg

SEQ ID NO: 17001 - DNA, 25 bp, Homo sapiens
tccaactggggaggggtccgatttg

SEQ ID NO: 17002 - DNA, 25 bp, Homo sapiens
aacttgaagaatgtgcctcctctta

SEQ ID NO: 17003 - DNA, 25 bp, Homo sapiens
aagctcatttttgtcctatccaaag

SEQ ID NO: 17004 - DNA, 25 bp, Homo sapiens
catctgtttctgactcccagttatt

SEQ ID NO: 17005 - DNA, 25 bp, Homo sapiens
ccctcctgcattctcaggctaaata

SEQ ID NO: 17006 - DNA, 25 bp, Homo sapiens
ctcctgccttgagactgcgtgttag

SEQ ID NO: 17007 - DNA, 25 bp, Homo sapiens
gagactgcgtgttagtcttccattc

SEQ ID NO: 17008 - DNA, 25 bp, Homo sapiens
ggaagggtgtcttgaggggcaggga

SEQ ID NO: 17009 - DNA, 25 bp, Homo sapiens
taaatagggcccccagtgactacct

SEQ ID NO: 17010 - DNA, 25 bp, Homo sapiens
tcagtccttcttatgtctagtctca

SEQ ID NO: 17011 - DNA, 25 bp, Homo sapiens
tctagtctcagttcattcagccaaa

SEQ ID NO: 17012 - DNA, 25 bp, Homo sapiens
tgtggggatggggcggaagggtgtc

SEQ ID NO: 17013 - DNA, 25 bp, Homo sapiens
acccctgagcccacaagggcagagc

SEQ ID NO: 17014 - DNA, 25 bp, Homo sapiens
agagacgcacaggagaccaagccag

SEQ ID NO: 17015 - DNA, 25 bp, Homo sapiens
gaaaccgttggcatctacttcggac

SEQ ID NO: 17016 - DNA, 25 bp, Homo sapiens
gaagtggaggcctctcagttaagaa

SEQ ID NO: 17017 - DNA, 25 bp, Homo sapiens
gcagactggttcatgtctcttgggg

SEQ ID NO: 17018 - DNA, 25 bp, Homo sapiens
gcatggggagcctgacgttttgaag

SEQ ID NO: 17019 - DNA, 25 bp, Homo sapiens
gcttcaactctatggagatgctcct

SEQ ID NO: 17020 - DNA, 25 bp, Homo sapiens
ggaagactgactgaggccacttcca

SEQ ID NO: 17021 - DNA, 25 bp, Homo sapiens
ggactagtgtaccgtatccacagcg

SEQ ID NO: 17022 - DNA, 25 bp, Homo sapiens
ggccttgctggtgtgttatcactat

SEQ ID NO: 17023 - DNA, 25 bp, Homo sapiens
tgatgagtttttccatttcgtcctc

SEQ ID NO: 17024 - DNA, 25 bp, Homo sapiens
aacaccttatcagaaagctctcctg

SEQ ID NO: 17025 - DNA, 25 bp, Homo sapiens
agcaccaccagttcgagaatcctgc

SEQ ID NO: 17026 - DNA, 25 bp, Homo sapiens
ccacttccgccacacatgaatatag

SEQ ID NO: 17027 - DNA, 25 bp, Homo sapiens
cccccttttgcagtgccaagcaatt

SEQ ID NO: 17028 - DNA, 25 bp, Homo sapiens
gaaggtcatttagtgcagttgccat

SEQ ID NO: 17029 - DNA, 25 bp, Homo sapiens
gactggaaagaccagcagctccaca

SEQ ID NO: 17030 - DNA, 25 bp, Homo sapiens
gcaattatgagggctaccactgaat

SEQ ID NO: 17031 - DNA, 25 bp, Homo sapiens
gcagttgccattgtcagcagctgtg

SEQ ID NO: 17032 - DNA, 25 bp, Homo sapiens
tacatgcttgtatcttcagttggag

SEQ ID NO: 17033 - DNA, 25 bp, Homo sapiens
ttcgagaatcctgcacgtcggacac

SEQ ID NO: 17034 - DNA, 25 bp, Homo sapiens
tttttcttgttcgccaattttgtat

SEQ ID NO: 17035 - DNA, 25 bp, Homo sapiens
aaggctttagccaggagcggaaact

SEQ ID NO: 17036 - DNA, 25 bp, Homo sapiens
agaagaaagcaaaccccagctcact

SEQ ID NO: 17037 - DNA, 25 bp, Homo sapiens
cctcaccctcattgtgctaatcatc

SEQ ID NO: 17038 - DNA, 25 bp, Homo sapiens
ctgtgggttgtttggatctatcgga

SEQ ID NO: 17039 - DNA, 25 bp, Homo sapiens
gaagtgtgcacttctttttcatcct

SEQ ID NO: 17040 - DNA, 25 bp, Homo sapiens
ggcagtcttgacttgcgatctagaa

SEQ ID NO: 17041 - DNA, 25 bp, Homo sapiens
ggcattccatgctatttttaatacc

SEQ ID NO: 17042 - DNA, 25 bp, Homo sapiens
ggcctgatgactcttttggtaacca

SEQ ID NO: 17043 - DNA, 25 bp, Homo sapiens
taatcatcacctatctttactggca

SEQ ID NO: 17044 - DNA, 25 bp, Homo sapiens
tcggaacctcattggaagtgtgcac

SEQ ID NO: 17045 - DNA, 25 bp, Homo sapiens
tgccacctgtgcctttaggaactgc

SEQ ID NO: 17046 - DNA, 25 bp, Homo sapiens
aagcaactggactgactttcttacc

SEQ ID NO: 17047 - DNA, 25 bp, Homo sapiens
actgactttcttaccagcagttacc

SEQ ID NO: 17048 - DNA, 25 bp, Homo sapiens
cacccaagtatatttcagtactgtc

SEQ ID NO: 17049 - DNA, 25 bp, Homo sapiens
ctggactgactttcttaccagcagt

SEQ ID NO: 17050 - DNA, 25 bp, Homo sapiens
gactcacccaagtatatttcagtac

SEQ ID NO: 17051 - DNA, 25 bp, Homo sapiens
gctgtgtggactcacccaagtatat

SEQ ID NO: 17052 - DNA, 25 bp, Homo sapiens
gtagaccccaggagtagagaaaagc

SEQ ID NO: 17053 - DNA, 25 bp, Homo sapiens
gtgtggactcacccaagtatatttc

SEQ ID NO: 17054 - DNA, 25 bp, Homo sapiens
gttacctagactgaggcaagctgtg

SEQ ID NO: 17055 - DNA, 25 bp, Homo sapiens
taccagcagttacctagactgaggc

SEQ ID NO: 17056 - DNA, 25 bp, Homo sapiens
tgaggcaagctgtgtggactcaccc

SEQ ID NO: 17057 - DNA, 25 bp, Homo sapiens
agttacaatgatcatagcactttaa

SEQ ID NO: 17058 - DNA, 25 bp, Homo sapiens
atactatgtttgtttctccatgagt

SEQ ID NO: 17059 - DNA, 25 bp, Homo sapiens
ccattaattctttcattcaatgact

SEQ ID NO: 17060 - DNA, 25 bp, Homo sapiens
gaagtaatacttttgggtatggcac

SEQ ID NO: 17061 - DNA, 25 bp, Homo sapiens
gaatacctactcttttagggcgctg

SEQ ID NO: 17062 - DNA, 25 bp, Homo sapiens
ggcgctgtgttaggtgctgtattgt

SEQ ID NO: 17063 - DNA, 25 bp, Homo sapiens
gtttttcctctgactattttactgt

SEQ ID NO: 17064 - DNA, 25 bp, Homo sapiens
tactcttttagggcgctgtgttagg

SEQ ID NO: 17065 - DNA, 25 bp, Homo sapiens
tgggtatggcactagtttttcctct

SEQ ID NO: 17066 - DNA, 25 bp, Homo sapiens
ttcctctgactattttactgtttct

SEQ ID NO: 17067 - DNA, 25 bp, Homo sapiens
ttctgacatagtgaatgaccttgaa

SEQ ID NO: 17068 - DNA, 25 bp, Homo sapiens
aagaccttaggcacatctcttcatt

SEQ ID NO: 17069 - DNA, 25 bp, Homo sapiens
aagccacctcttgcaggaaactgca

SEQ ID NO: 17070 - DNA, 25 bp, Homo sapiens
agtcagagtcgctggcccagcagac

SEQ ID NO: 17071 - DNA, 25 bp, Homo sapiens
caaagactcgtgaagctttctccac

SEQ ID NO: 17072 - DNA, 25 bp, Homo sapiens
caccaccaccagacttttgctggca

SEQ ID NO: 17073 - DNA, 25 bp, Homo sapiens
cctgtccatcacccagcagaaatgg

SEQ ID NO: 17074 - DNA, 25 bp, Homo sapiens
ctgccacaagctgcatgcacaaaga

SEQ ID NO: 17075 - DNA, 25 bp, Homo sapiens
gcagccacaggacacttttgacttg

SEQ ID NO: 17076 - DNA, 25 bp, Homo sapiens
gtagacagaccagaactgcgtcggt

SEQ ID NO: 17077 - DNA, 25 bp, Homo sapiens
tgcgtcggtctttaagccagcagcc

SEQ ID NO: 17078 - DNA, 25 bp, Homo sapiens
tggaatccacatcctaatgctgcca

SEQ ID NO: 17079 - DNA, 25 bp, Homo sapiens
aaactgccctgggtggctggatgtc

SEQ ID NO: 17080 - DNA, 25 bp, Homo sapiens
aagatttacagctcacattgcccgg

SEQ ID NO: 17081 - DNA, 25 bp, Homo sapiens
cccatcccaacacactactttgtgg

SEQ ID NO: 17082 - DNA, 25 bp, Homo sapiens
cccgggtccgtgatgtagaacttct

SEQ ID NO: 17083 - DNA, 25 bp, Homo sapiens
ctggatgtcctaccctttatcatcc

SEQ ID NO: 17084 - DNA, 25 bp, Homo sapiens
gatggccattttgatgctccagatg

SEQ ID NO: 17085 - DNA, 25 bp, Homo sapiens
ggactacttccacagtgttcttctt

SEQ ID NO: 17086 - DNA, 25 bp, Homo sapiens
gtgcagcctgtctctgaaattttgc

SEQ ID NO: 17087 - DNA, 25 bp, Homo sapiens
tagaacttctcactgggcttgactt

SEQ ID NO: 17088 - DNA, 25 bp, Homo sapiens
tcaccgacctaccaacgtggagagc

SEQ ID NO: 17089 - DNA, 25 bp, Homo sapiens
ttagccaacactgatgttcccatcc

SEQ ID NO: 17090 - DNA, 25 bp, Homo sapiens
accagatctacctaaacctcaagtc

SEQ ID NO: 17091 - DNA, 25 bp, Homo sapiens
agatattctgacttgctccagtgtc

SEQ ID NO: 17092 - DNA, 25 bp, Homo sapiens
atgatgtcttcagttctggtacctc

SEQ ID NO: 17093 - DNA, 25 bp, Homo sapiens
gaaacaccccacgtttctgaatttg

SEQ ID NO: 17094 - DNA, 25 bp, Homo sapiens
gatcccctccaggaggatcctgagc

SEQ ID NO: 17095 - DNA, 25 bp, Homo sapiens
gcagtgcgttttactcaagtagcca

SEQ ID NO: 17096 - DNA, 25 bp, Homo sapiens
ggaccttctgggagcaggtgctaac

SEQ ID NO: 17097 - DNA, 25 bp, Homo sapiens
taagtttacagcgttgttccctttg

SEQ ID NO: 17098 - DNA, 25 bp, Homo sapiens
tatgttaaagttgctttcctgctgt

SEQ ID NO: 17099 - DNA, 25 bp, Homo sapiens
tccctttgcgtttgcagtgcgtttt

SEQ ID NO: 17100 - DNA, 25 bp, Homo sapiens
ttgctccagtgtcaagggaccttct

SEQ ID NO: 17101 - DNA, 25 bp, Homo sapiens
aaccatgatttgcaactgtaacagg

SEQ ID NO: 17102 - DNA, 25 bp, Homo sapiens
aagcgtacctgtttgtgaacttaat

SEQ ID NO: 17103 - DNA, 25 bp, Homo sapiens
atccactgccatgtgatccataatt

SEQ ID NO: 17104 - DNA, 25 bp, Homo sapiens
attcggcccatattttgtgtgtttg

SEQ ID NO: 17105 - DNA, 25 bp, Homo sapiens
gaagagaaaaccactaaccttgatt

SEQ ID NO: 17106 - DNA, 25 bp, Homo sapiens
gaccatttattataagcgtacctgt

SEQ ID NO: 17107 - DNA, 25 bp, Homo sapiens
gctgtttttgcttaggtgatccact

SEQ ID NO: 17108 - DNA, 25 bp, Homo sapiens
gtgatccataatttttctacataaa

SEQ ID NO: 17109 - DNA, 25 bp, Homo sapiens
gtgtgtttggacaagtacatctccc

SEQ ID NO: 17110 - DNA, 25 bp, Homo sapiens
tctacttgttaatatattcggccca

SEQ ID NO: 17111 - DNA, 25 bp, Homo sapiens
tctcccttttgcctaatgaactttt

SEQ ID NO: 17112 - DNA, 25 bp, Homo sapiens
aaggaatctggcattctacacctgg

SEQ ID NO: 17113 - DNA, 25 bp, Homo sapiens
attggtgtatatcatgaagccttgc

SEQ ID NO: 17114 - DNA, 25 bp, Homo sapiens
cacctggaccatttgattgttttat

SEQ ID NO: 17115 - DNA, 25 bp, Homo sapiens
ccagatatgaacagggcccaggcct

SEQ ID NO: 17116 - DNA, 25 bp, Homo sapiens
ctcttccgggagctggtgacagcct

SEQ ID NO: 17117 - DNA, 25 bp, Homo sapiens
ctgcggatagcatttggtaggtagt

SEQ ID NO: 17118 - DNA, 25 bp, Homo sapiens
ggcctggagcgtttgctgtgccagg

SEQ ID NO: 17119 - DNA, 25 bp, Homo sapiens
gtttgctgtgccaggaggcggcagc

SEQ ID NO: 17120 - DNA, 25 bp, Homo sapiens
tacttaatcctttaactctgcggat

SEQ ID NO: 17121 - DNA, 25 bp, Homo sapiens
tcccacgacaaaaacaagactgcct

SEQ ID NO: 17122 - DNA, 25 bp, Homo sapiens
tttcagtcccaaagcggccgatggg

SEQ ID NO: 17123 - DNA, 25 bp, Homo sapiens
aagcccacccgaatcttgtagaaat

SEQ ID NO: 17124 - DNA, 25 bp, Homo sapiens
agagcacggctgaccatttctgctc

SEQ ID NO: 17125 - DNA, 25 bp, Homo sapiens
cagcatccgcaagctgcagtgctag

SEQ ID NO: 17126 - DNA, 25 bp, Homo sapiens
gagatgaacgacatcaacgcgccct

SEQ ID NO: 17127 - DNA, 25 bp, Homo sapiens
gataacctacatcaaccgagatacc

SEQ ID NO: 17128 - DNA, 25 bp, Homo sapiens
gatcacctcggtgaagcggtggcag

SEQ ID NO: 17129 - DNA, 25 bp, Homo sapiens
gcgccctatctggtcatgggacaga

SEQ ID NO: 17130 - DNA, 25 bp, Homo sapiens
gcttgcagtgcacctgtgaggagat

SEQ ID NO: 17131 - DNA, 25 bp, Homo sapiens
ggagaccaagagcaagaccatttac

SEQ ID NO: 17132 - DNA, 25 bp, Homo sapiens
ggggcagagagagttcaagcgcatc

SEQ ID NO: 17133 - DNA, 25 bp, Homo sapiens
gtggctcaaagacagcttgcagtgc

SEQ ID NO: 17134 - DNA, 25 bp, Homo sapiens
atagccatcgggtctctaaagctga

SEQ ID NO: 17135 - DNA, 25 bp, Homo sapiens
caaagaacaagcaaatggacccccg

SEQ ID NO: 17136 - DNA, 25 bp, Homo sapiens
cccactgcccatatctgtggactgc

SEQ ID NO: 17137 - DNA, 25 bp, Homo sapiens
cccctcctgaatctcgtatgatggt

SEQ ID NO: 17138 - DNA, 25 bp, Homo sapiens
gaatacttgaatgtcggggggcctg

SEQ ID NO: 17139 - DNA, 25 bp, Homo sapiens
gagtggctagcagcgtttgtttgtt

SEQ ID NO: 17140 - DNA, 25 bp, Homo sapiens
gtatgatggtcacagtccggtggcc

SEQ ID NO: 17141 - DNA, 25 bp, Homo sapiens
gtcagtgattccatgtttcgtaacg

SEQ ID NO: 17142 - DNA, 25 bp, Homo sapiens
ttcgtaacgggggattctctgcctt

SEQ ID NO: 17143 - DNA, 25 bp, Homo sapiens
ttctcgcctgtcagtgattccatgt

SEQ ID NO: 17144 - DNA, 25 bp, Homo sapiens
ttgcttccctgttcttgaagaatac

SEQ ID NO: 17145 - DNA, 25 bp, Homo sapiens
aattcgacagtgtctacgatccctc

SEQ ID NO: 17146 - DNA, 25 bp, Homo sapiens
acctacagaccagctcctgttagct

SEQ ID NO: 17147 - DNA, 25 bp, Homo sapiens
agaaggactcctggcgcaaagcttc

SEQ ID NO: 17148 - DNA, 25 bp, Homo sapiens
cagaaaccaggctcgaggcctatcc

SEQ ID NO: 17149 - DNA, 25 bp, Homo sapiens
cgagcggcagcatgtcaatgaccag

SEQ ID NO: 17150 - DNA, 25 bp, Homo sapiens
cttcccgctcagctgctgagtcagc

SEQ ID NO: 17151 - DNA, 25 bp, Homo sapiens
gacagttctgcagtctaccaatcga

SEQ ID NO: 17152 - DNA, 25 bp, Homo sapiens
gggtgacccaattattcagacctaa

SEQ ID NO: 17153 - DNA, 25 bp, Homo sapiens
gggttctgcattcctatgggtgacc

SEQ ID NO: 17154 - DNA, 25 bp, Homo sapiens
tccaggcccggatcaagtctctgga

SEQ ID NO: 17155 - DNA, 25 bp, Homo sapiens
ttgagcgactggacggcctgaggaa

SEQ ID NO: 17156 - DNA, 25 bp, Homo sapiens
aaagatgagctttgtctaccttcaa

SEQ ID NO: 17157 - DNA, 25 bp, Homo sapiens
aatgacaggcctgtccaacacatct

SEQ ID NO: 17158 - DNA, 25 bp, Homo sapiens
caccaactactacctgtaatgacag

SEQ ID NO: 17159 - DNA, 25 bp, Homo sapiens
cagactggatgtaccaccaactact

SEQ ID NO: 17160 - DNA, 25 bp, Homo sapiens
ctccacatacttcagtgagggtaag

SEQ ID NO: 17161 - DNA, 25 bp, Homo sapiens
gactggactctaaattctgttgatt

SEQ ID NO: 17162 - DNA, 25 bp, Homo sapiens
gattgaacctgaatattgccattat

SEQ ID NO: 17163 - DNA, 25 bp, Homo sapiens
gggaattttattgacacagtaccat

SEQ ID NO: 17164 - DNA, 25 bp, Homo sapiens
gggtaagtattttcctgttgtcaag

SEQ ID NO: 17165 - DNA, 25 bp, Homo sapiens
gtggtagccagcatcggaaagaacg

SEQ ID NO: 17166 - DNA, 25 bp, Homo sapiens
tgccattatgcttgacatggtttcc

SEQ ID NO: 17167 - DNA, 25 bp, Homo sapiens
aatagcctcacggcacagtactctt

SEQ ID NO: 17168 - DNA, 25 bp, Homo sapiens
agagcatccagggaggtttctcgcc

SEQ ID NO: 17169 - DNA, 25 bp, Homo sapiens
agtgctgacagcctttttaaccaat

SEQ ID NO: 17170 - DNA, 25 bp, Homo sapiens
gatattagtgttaccagcattcatg

SEQ ID NO: 17171 - DNA, 25 bp, Homo sapiens
ggcagtaactggacaccttttattt

SEQ ID NO: 17172 - DNA, 25 bp, Homo sapiens
ggctgtctgcttatttatactagcg

SEQ ID NO: 17173 - DNA, 25 bp, Homo sapiens
ggtgcctgcagaacttgtgtttttc

SEQ ID NO: 17174 - DNA, 25 bp, Homo sapiens
gtagacagcggtaggtgcctgcaga

SEQ ID NO: 17175 - DNA, 25 bp, Homo sapiens
gtatgcttcataactgctttacaga

SEQ ID NO: 17176 - DNA, 25 bp, Homo sapiens
tggatttcccttcttagtatgcttc

SEQ ID NO: 17177 - DNA, 25 bp, Homo sapiens
ttctttctcatgtatctcgtgttta

SEQ ID NO: 17178 - DNA, 25 bp, Homo sapiens
actactttggtacaggctatcagga

SEQ ID NO: 17179 - DNA, 25 bp, Homo sapiens
agagttactggctgtcatttttcat

SEQ ID NO: 17180 - DNA, 25 bp, Homo sapiens
agttttctcattgctacagtgtatt

SEQ ID NO: 17181 - DNA, 25 bp, Homo sapiens
atccaagctcattgtctgttttctc

SEQ ID NO: 17182 - DNA, 25 bp, Homo sapiens
cctggttaccatttgtactacttca

SEQ ID NO: 17183 - DNA, 25 bp, Homo sapiens
gaagtgctgcttcattccacttaca

SEQ ID NO: 17184 - DNA, 25 bp, Homo sapiens
gaatattccctggttatactttgtc

SEQ ID NO: 17185 - DNA, 25 bp, Homo sapiens
gattacctttggatccatttgtcaa

SEQ ID NO: 17186 - DNA, 25 bp, Homo sapiens
gtctgttttctcagtacctggttac

SEQ ID NO: 17187 - DNA, 25 bp, Homo sapiens
ttcatcccactccagttatactgtg

SEQ ID NO: 17188 - DNA, 25 bp, Homo sapiens
ttgtagctttcataacctgttggga

SEQ ID NO: 17189 - DNA, 25 bp, Homo sapiens
aaacgttatttcagtggcatgggct

SEQ ID NO: 17190 - DNA, 25 bp, Homo sapiens
aactgcatccttttggagtcctttg

SEQ ID NO: 17191 - DNA, 25 bp, Homo sapiens
aagagacaggctggtgcccaaggct

SEQ ID NO: 17192 - DNA, 25 bp, Homo sapiens
ccatgtgtgtggccttatcagaaca

SEQ ID NO: 17193 - DNA, 25 bp, Homo sapiens
ctcaactgaccatttgcttctcaga

SEQ ID NO: 17194 - DNA, 25 bp, Homo sapiens
gaaacacatacaactgcatcctttt

SEQ ID NO: 17195 - DNA, 25 bp, Homo sapiens
gacgtcccggcagatctggaatggg

SEQ ID NO: 17196 - DNA, 25 bp, Homo sapiens
gatttccattacgctatttctgtga

SEQ ID NO: 17197 - DNA, 25 bp, Homo sapiens
gccagctctggacatctgaggacgt

SEQ ID NO: 17198 - DNA, 25 bp, Homo sapiens
ggcatgggctggaagcttatcacaa

SEQ ID NO: 17199 - DNA, 25 bp, Homo sapiens
tctggaatggggccctcaactgacc

SEQ ID NO: 17200 - DNA, 25 bp, Homo sapiens
ataagggccctactacactggcttt

SEQ ID NO: 17201 - DNA, 25 bp, Homo sapiens
attggcccagtagtggcttctagct

SEQ ID NO: 17202 - DNA, 25 bp, Homo sapiens
caggagtaagcttctagaccccttc

SEQ ID NO: 17203 - DNA, 25 bp, Homo sapiens
ctctggctgtctcgagcagtctaga

SEQ ID NO: 17204 - DNA, 25 bp, Homo sapiens
cttctagctctaaatgtttgccccg

SEQ ID NO: 17205 - DNA, 25 bp, Homo sapiens
gaaacagctgggtctttggccataa

SEQ ID NO: 17206 - DNA, 25 bp, Homo sapiens
gtgcatctccagcctatgaaacagc

SEQ ID NO: 17207 - DNA, 25 bp, Homo sapiens
tcaagattctgctaactcctgcaca

SEQ ID NO: 17208 - DNA, 25 bp, Homo sapiens
tgcttgtttttcctttggccatagg

SEQ ID NO: 17209 - DNA, 25 bp, Homo sapiens
ttcctgtgcaagtaccgaccataga

SEQ ID NO: 17210 - DNA, 25 bp, Homo sapiens
ttcctttctgctagcctggctaaat

SEQ ID NO: 17211 - DNA, 25 bp, Homo sapiens
aggacccacggggcattatcttgtc

SEQ ID NO: 17212 - DNA, 25 bp, Homo sapiens
ccgagaagggacggtcatctgctcc

SEQ ID NO: 17213 - DNA, 25 bp, Homo sapiens
cgccacccccataactttgggagcg

SEQ ID NO: 17214 - DNA, 25 bp, Homo sapiens
cggtagttccggtgtcaacatggac

SEQ ID NO: 17215 - DNA, 25 bp, Homo sapiens
ggatgtgaagttatccagcctctgc

SEQ ID NO: 17216 - DNA, 25 bp, Homo sapiens
ggcccagccgagggtggatttatct

SEQ ID NO: 17217 - DNA, 25 bp, Homo sapiens
ggcttcaagaaaccgtcatgcccgc

SEQ ID NO: 17218 - DNA, 25 bp, Homo sapiens
gtcatgcccgcttgagggtcaggac

SEQ ID NO: 17219 - DNA, 25 bp, Homo sapiens
gtctgtgattccgggttgctgtgac

SEQ ID NO: 17220 - DNA, 25 bp, Homo sapiens
tctgccctcccgaaactaagcgggg

SEQ ID NO: 17221 - DNA, 25 bp, Homo sapiens
ttgctgtgacagccggtagagcctc

SEQ ID NO: 17222 - DNA, 25 bp, Homo sapiens
aagaagaccagctgtgaggtgaggg

SEQ ID NO: 17223 - DNA, 25 bp, Homo sapiens
cagggcccggaaacaggtcaagaca

SEQ ID NO: 17224 - DNA, 25 bp, Homo sapiens
ctggacgcttttcgtggttttgcaa

SEQ ID NO: 17225 - DNA, 25 bp, Homo sapiens
cttcaaagtggaggtggagtgctgg

SEQ ID NO: 17226 - DNA, 25 bp, Homo sapiens
gctctgcctctgaacttcaaagtgg

SEQ ID NO: 17227 - DNA, 25 bp, Homo sapiens
ggagagcaagaagaccagctgtgag

SEQ ID NO: 17228 - DNA, 25 bp, Homo sapiens
ggcccggaaacaggtcaagacagtg

SEQ ID NO: 17229 - DNA, 25 bp, Homo sapiens
gtcaagacagtgaggttccagaccc

SEQ ID NO: 17230 - DNA, 25 bp, Homo sapiens
tgagggctagagacagcccacgggc

SEQ ID NO: 17231 - DNA, 25 bp, Homo sapiens
ttcgtggttttgcaagcgccggaga

SEQ ID NO: 17232 - DNA, 25 bp, Homo sapiens
ttttcgtggttttgcaagcgccgga

SEQ ID NO: 17233 - DNA, 25 bp, Homo sapiens
acaggcccactcacatttgaggcaa

SEQ ID NO: 17234 - DNA, 25 bp, Homo sapiens
agtatctaactttacaggcccactc

SEQ ID NO: 17235 - DNA, 25 bp, Homo sapiens
caaaagagctctctgtactttcccc

SEQ ID NO: 17236 - DNA, 25 bp, Homo sapiens
ccttcacttcccgagggcgggtgag

SEQ ID NO: 17237 - DNA, 25 bp, Homo sapiens
gaatttggcgtcagtggtaacacac

SEQ ID NO: 17238 - DNA, 25 bp, Homo sapiens
gcagctgtggacagatgtgcttcct

SEQ ID NO: 17239 - DNA, 25 bp, Homo sapiens
gccccttcgttttgctcagaggaag

SEQ ID NO: 17240 - DNA, 25 bp, Homo sapiens
gtgcttcctgagcatgggttgtgcc

SEQ ID NO: 17241 - DNA, 25 bp, Homo sapiens
gttgtgcctcccatcagtaaaaaaa

SEQ ID NO: 17242 - DNA, 25 bp, Homo sapiens
gtttagttcacttccttaattgtat

SEQ ID NO: 17243 - DNA, 25 bp, Homo sapiens
tgtgagtttcggggtcagtgtccca

SEQ ID NO: 17244 - DNA, 25 bp, Homo sapiens
aatgcataccactgtctgtaaaccc

SEQ ID NO: 17245 - DNA, 25 bp, Homo sapiens
aattcactgttctcttttggattta

SEQ ID NO: 17246 - DNA, 25 bp, Homo sapiens
aattgtgttgtgatgctactcactt

SEQ ID NO: 17247 - DNA, 25 bp, Homo sapiens
atatggaacatgcctattaaacgaa

SEQ ID NO: 17248 - DNA, 25 bp, Homo sapiens
gaacaatagtcaaaactcacatgga

SEQ ID NO: 17249 - DNA, 25 bp, Homo sapiens
gatgctactcactttgattgcaatg

SEQ ID NO: 17250 - DNA, 25 bp, Homo sapiens
gcttctagtatgtgcctactgtgat

SEQ ID NO: 17251 - DNA, 25 bp, Homo sapiens
ggcaggttacttccaaatcgcactg

SEQ ID NO: 17252 - DNA, 25 bp, Homo sapiens
gtctgacgtattttgcttctagtat

SEQ ID NO: 17253 - DNA, 25 bp, Homo sapiens
ttaggatatttttgtctgacgtatt

SEQ ID NO: 17254 - DNA, 25 bp, Homo sapiens
ttttggatttatttagcctgatgta

SEQ ID NO: 17255 - DNA, 25 bp, Homo sapiens
aaatacagggcactacagttcagac

SEQ ID NO: 17256 - DNA, 25 bp, Homo sapiens
aagggagcatgtttcacagtggctg

SEQ ID NO: 17257 - DNA, 25 bp, Homo sapiens
acaatacaacaagagcgtccacgag

SEQ ID NO: 17258 - DNA, 25 bp, Homo sapiens
acagtggctggactaccgagagctt

SEQ ID NO: 17259 - DNA, 25 bp, Homo sapiens
acatgtactacagctatatttgatt

SEQ ID NO: 17260 - DNA, 25 bp, Homo sapiens
gagagcttggactacacaatacagt

SEQ ID NO: 17261 - DNA, 25 bp, Homo sapiens
gagatctacacatgttgccttgcat

SEQ ID NO: 17262 - DNA, 25 bp, Homo sapiens
gagcgtccacgaggttaatctaaag

SEQ ID NO: 17263 - DNA, 25 bp, Homo sapiens
gccttgcatttgtggtaatctacac

SEQ ID NO: 17264 - DNA, 25 bp, Homo sapiens
ggactaccgagagcttggactacac

SEQ ID NO: 17265 - DNA, 25 bp, Homo sapiens
ggcactacagttcagacaatacaac

SEQ ID NO: 17266 - DNA, 25 bp, Homo sapiens
aaattcacagagctggttgcccggc

SEQ ID NO: 17267 - DNA, 25 bp, Homo sapiens
actgtggcttgggccttgtgacatt

SEQ ID NO: 17268 - DNA, 25 bp, Homo sapiens
caaccttgtgagcctgaacagcctc

SEQ ID NO: 17269 - DNA, 25 bp, Homo sapiens
ctgctcagctattcttgggccagat

SEQ ID NO: 17270 - DNA, 25 bp, Homo sapiens
gacattgtctacctgtggtcattcc

SEQ ID NO: 17271 - DNA, 25 bp, Homo sapiens
gcactttgaccgtggcatcaacgac

SEQ ID NO: 17272 - DNA, 25 bp, Homo sapiens
gcccctagcacgaattgaggcctct

SEQ ID NO: 17273 - DNA, 25 bp, Homo sapiens
ggccatcatcatgtacaaccttgtg

SEQ ID NO: 17274 - DNA, 25 bp, Homo sapiens
tgcagatgtcccgtagggtccgggc

SEQ ID NO: 17275 - DNA, 25 bp, Homo sapiens
tggagccatgaacttctgggccatc

SEQ ID NO: 17276 - DNA, 25 bp, Homo sapiens
tggtcattccttaactgctttggcc

SEQ ID NO: 17277 - DNA, 25 bp, Homo sapiens
agagcacacggtcttcagtgaagct

SEQ ID NO: 17278 - DNA, 25 bp, Homo sapiens
aggaagtggccctgaatgctaacac

SEQ ID NO: 17279 - DNA, 25 bp, Homo sapiens
cagtgaagctgcagggcacttccaa

SEQ ID NO: 17280 - DNA, 25 bp, Homo sapiens
ctccaacgcatatattccctctggg

SEQ ID NO: 17281 - DNA, 25 bp, Homo sapiens
ctttccagagccaggtcgagctttc

SEQ ID NO: 17282 - DNA, 25 bp, Homo sapiens
gaagtccggattcattctgggtctt

SEQ ID NO: 17283 - DNA, 25 bp, Homo sapiens
gcctctttttcaccaacggagaaca

SEQ ID NO: 17284 - DNA, 25 bp, Homo sapiens
ggaactctctccatggcaaatgtca

SEQ ID NO: 17285 - DNA, 25 bp, Homo sapiens
tggcaaatgtcagctcttgttcagg

SEQ ID NO: 17286 - DNA, 25 bp, Homo sapiens
tgttcaggtccatgcaagtcagccc

SEQ ID NO: 17287 - DNA, 25 bp, Homo sapiens
ttcggttctttctcgggaatattca

SEQ ID NO: 17288 - DNA, 25 bp, Homo sapiens
aaactctctaagtacatccacctgt

SEQ ID NO: 17289 - DNA, 25 bp, Homo sapiens
atcagcttttgtgctaaaactctct

SEQ ID NO: 17290 - DNA, 25 bp, Homo sapiens
atccttccaacagggcagtcaggcc

SEQ ID NO: 17291 - DNA, 25 bp, Homo sapiens
attcgactgagcacactttcatatt

SEQ ID NO: 17292 - DNA, 25 bp, Homo sapiens
cacaaaatggagccacgttcccgtc

SEQ ID NO: 17293 - DNA, 25 bp, Homo sapiens
ctgggagagagcatccttccaacag

SEQ ID NO: 17294 - DNA, 25 bp, Homo sapiens
gcacctcactaaccattcgactgag

SEQ ID NO: 17295 - DNA, 25 bp, Homo sapiens
gccctgatttaaagccaagtccaca

SEQ ID NO: 17296 - DNA, 25 bp, Homo sapiens
ggtgctggtctcagtgtcagtgata

SEQ ID NO: 17297 - DNA, 25 bp, Homo sapiens
tcccgtcctctggaggatatggcca

SEQ ID NO: 17298 - DNA, 25 bp, Homo sapiens
tgatagccgatgaggagtcccagga

SEQ ID NO: 17299 - DNA, 25 bp, Homo sapiens
cggtgatccctgtggtctatgattt

SEQ ID NO: 17300 - DNA, 25 bp, Homo sapiens
ctgaggcagctgtgcttctattcta

SEQ ID NO: 17301 - DNA, 25 bp, Homo sapiens
gacataatctgtttggcatctacca

SEQ ID NO: 17302 - DNA, 25 bp, Homo sapiens
gaggaggatactttccagaggccag

SEQ ID NO: 17303 - DNA, 25 bp, Homo sapiens
gccaacgccttgtgtgctggaatga

SEQ ID NO: 17304 - DNA, 25 bp, Homo sapiens
gccagcgggaattcactgcgggatt

SEQ ID NO: 17305 - DNA, 25 bp, Homo sapiens
ggcatctggcacgtgcccaataagt

SEQ ID NO: 17306 - DNA, 25 bp, Homo sapiens
ggtcaccggatgtaacactgagcac

SEQ ID NO: 17307 - DNA, 25 bp, Homo sapiens
gtctatgattttggcgacgcccaga

SEQ ID NO: 17308 - DNA, 25 bp, Homo sapiens
tcccccatgcagcactggagaaaca

SEQ ID NO: 17309 - DNA, 25 bp, Homo sapiens
ttggactgacaacggcccggtgatc

SEQ ID NO: 17310 - DNA, 25 bp, Homo sapiens
aataacaccttttcttgcattctga

SEQ ID NO: 17311 - DNA, 25 bp, Homo sapiens
cagagaaacttgttcccatgaccct

SEQ ID NO: 17312 - DNA, 25 bp, Homo sapiens
cctctgtgaagtgcccaaatgcgaa

SEQ ID NO: 17313 - DNA, 25 bp, Homo sapiens
gatgggacatggtagactgtggccc

SEQ ID NO: 17314 - DNA, 25 bp, Homo sapiens
gccagacagcctttatactagattc

SEQ ID NO: 17315 - DNA, 25 bp, Homo sapiens
ggctatgaaactgacttctaggcta

SEQ ID NO: 17316 - DNA, 25 bp, Homo sapiens
gggtatgggtgggcacattatcctt

SEQ ID NO: 17317 - DNA, 25 bp, Homo sapiens
gtcctttttcaagcctgtttagatg

SEQ ID NO: 17318 - DNA, 25 bp, Homo sapiens
tcttgggtctgtgtcctttttcaag

SEQ ID NO: 17319 - DNA, 25 bp, Homo sapiens
ttagatgggggagtgcccatgccct

SEQ ID NO: 17320 - DNA, 25 bp, Homo sapiens
tttctcccctgggcttgtaagaaga

SEQ ID NO: 17321 - DNA, 25 bp, Homo sapiens
aaaggcctttgctacatcctgatta

SEQ ID NO: 17322 - DNA, 25 bp, Homo sapiens
aatcaagtggctccagtagctctgg

SEQ ID NO: 17323 - DNA, 25 bp, Homo sapiens
aatctgggctggtacaggcctcagc

SEQ ID NO: 17324 - DNA, 25 bp, Homo sapiens
agagttgttggctgagacctgcttg

SEQ ID NO: 17325 - DNA, 25 bp, Homo sapiens
atgacatgggaccaaggccagcgca

SEQ ID NO: 17326 - DNA, 25 bp, Homo sapiens
cacctctgcctggaagtctatactc

SEQ ID NO: 17327 - DNA, 25 bp, Homo sapiens
gcctctgtgcctctatggagactat

SEQ ID NO: 17328 - DNA, 25 bp, Homo sapiens
gccttgccctcaatgcacgaaaggt

SEQ ID NO: 17329 - DNA, 25 bp, Homo sapiens
ggctgacctgtgcttagaagtcctt

SEQ ID NO: 17330 - DNA, 25 bp, Homo sapiens
ggtgctgccccagtatgacatggga

SEQ ID NO: 17331 - DNA, 25 bp, Homo sapiens
tggcccttcatctgttcaggaacac

SEQ ID NO: 17332 - DNA, 25 bp, Homo sapiens
aattccttggcagcctgaagcgcca

SEQ ID NO: 17333 - DNA, 25 bp, Homo sapiens
atgaagactctgcaattggtccccg

SEQ ID NO: 17334 - DNA, 25 bp, Homo sapiens
atttcagcagatctttctacctact

SEQ ID NO: 17335 - DNA, 25 bp, Homo sapiens
cactacttggtttctgatttgctct

SEQ ID NO: 17336 - DNA, 25 bp, Homo sapiens
gagaagcacctgttccaactaagac

SEQ ID NO: 17337 - DNA, 25 bp, Homo sapiens
gcagtttctctacatgggctttgac

SEQ ID NO: 17338 - DNA, 25 bp, Homo sapiens
gcccctacggctttaggcatggagc

SEQ ID NO: 17339 - DNA, 25 bp, Homo sapiens
gcgattactaccaacgtcactatga

SEQ ID NO: 17340 - DNA, 25 bp, Homo sapiens
gtatctcctaatgccttacactact

SEQ ID NO: 17341 - DNA, 25 bp, Homo sapiens
tagcgattctcttcatgtatctcct

SEQ ID NO: 17342 - DNA, 25 bp, Homo sapiens
tgactactaaccatgacttgccaca

SEQ ID NO: 17343 - DNA, 25 bp, Homo sapiens
ccagcgattcggacacggatgtgaa

SEQ ID NO: 17344 - DNA, 25 bp, Homo sapiens
ccatggagttcgacctgggagcagc

SEQ ID NO: 17345 - DNA, 25 bp, Homo sapiens
cggacacggatgtgaagtcccacgc

SEQ ID NO: 17346 - DNA, 25 bp, Homo sapiens
ctcccagaagcccggtgtgggggcg

SEQ ID NO: 17347 - DNA, 25 bp, Homo sapiens
gcgattcggacacggatgtgaagtc

SEQ ID NO: 17348 - DNA, 25 bp, Homo sapiens
gctccaagcagcacgagagcatccc

SEQ ID NO: 17349 - DNA, 25 bp, Homo sapiens
ggacacggatgtgaagtcccacgct

SEQ ID NO: 17350 - DNA, 25 bp, Homo sapiens
tccagcgattcggacacggatgtga

SEQ ID NO: 17351 - DNA, 25 bp, Homo sapiens
tcccagaagcccggtgtgggggcgg

SEQ ID NO: 17352 - DNA, 25 bp, Homo sapiens
tggctccaagcagcacgagagcatc

SEQ ID NO: 17353 - DNA, 25 bp, Homo sapiens
ttctcttaccgccatggagttcgac

SEQ ID NO: 17354 - DNA, 25 bp, Homo sapiens
agcagaccaggtaccttggctgcac

SEQ ID NO: 17355 - DNA, 25 bp, Homo sapiens
caccatggatctccgtgtacactat

SEQ ID NO: 17356 - DNA, 25 bp, Homo sapiens
cctctccctagatcagtctgtgagg

SEQ ID NO: 17357 - DNA, 25 bp, Homo sapiens
gatattgtgtacaccatgcccatgt

SEQ ID NO: 17358 - DNA, 25 bp, Homo sapiens
gctagcgctgggcattcagtacata

SEQ ID NO: 17359 - DNA, 25 bp, Homo sapiens
gggtggcagaagcaagctagcgctg

SEQ ID NO: 17360 - DNA, 25 bp, Homo sapiens
gtgagggtccctgtagatattgtgt

SEQ ID NO: 17361 - DNA, 25 bp, Homo sapiens
gtgatcttctattgggtctttctga

SEQ ID NO: 17362 - DNA, 25 bp, Homo sapiens
tcagtacataccacgatgtgctccc

SEQ ID NO: 17363 - DNA, 25 bp, Homo sapiens
tgcctgcgtctgtgctcaaagcagc

SEQ ID NO: 17364 - DNA, 25 bp, Homo sapiens
tgtgctcaaagcagcagctccaacc

SEQ ID NO: 17365 - DNA, 25 bp, Homo sapiens
aaagctgtgcctttgagcctatact

SEQ ID NO: 17366 - DNA, 25 bp, Homo sapiens
aaagtgactttcacggttccttcat

SEQ ID NO: 17367 - DNA, 25 bp, Homo sapiens
actttaacttaccaagcaccaagtg

SEQ ID NO: 17368 - DNA, 25 bp, Homo sapiens
agctctgctgtgttaactttgtgaa

SEQ ID NO: 17369 - DNA, 25 bp, Homo sapiens
agtgtgataattgtgtctacagcta

SEQ ID NO: 17370 - DNA, 25 bp, Homo sapiens
atggtggacctattaccctatgggt

SEQ ID NO: 17371 - DNA, 25 bp, Homo sapiens
gacatcggatgtttcagcaactgtt

SEQ ID NO: 17372 - DNA, 25 bp, Homo sapiens
gagcctatactatactgtgtatgtg

SEQ ID NO: 17373 - DNA, 25 bp, Homo sapiens
gatttatggcattgagtatcacact

SEQ ID NO: 17374 - DNA, 25 bp, Homo sapiens
gtatcacactcagctctgctgtgtt

SEQ ID NO: 17375 - DNA, 25 bp, Homo sapiens
ttttttgtaggcatttttctgtcag

SEQ ID NO: 17376 - DNA, 25 bp, Homo sapiens
atcacttttgatgccattcaggagg

SEQ ID NO: 17377 - DNA, 25 bp, Homo sapiens
atgaggccattgcaagcttcgtgaa

SEQ ID NO: 17378 - DNA, 25 bp, Homo sapiens
ccattcaggaggcatgtgccagagc

SEQ ID NO: 17379 - DNA, 25 bp, Homo sapiens
cgcattgctgtcccaaggaatccag

SEQ ID NO: 17380 - DNA, 25 bp, Homo sapiens
ctcagtctgcagggctccataatga

SEQ ID NO: 17381 - DNA, 25 bp, Homo sapiens
gaagaagtacaacacatatgcctat

SEQ ID NO: 17382 - DNA, 25 bp, Homo sapiens
gaggcatttaggccatgggacaggg

SEQ ID NO: 17383 - DNA, 25 bp, Homo sapiens
gcaatgggcagtccatcacttttga

SEQ ID NO: 17384 - DNA, 25 bp, Homo sapiens
ggcttccagctcatctagatgagga

SEQ ID NO: 17385 - DNA, 25 bp, Homo sapiens
gtaaactacaccaactggtaccgag

SEQ ID NO: 17386 - DNA, 25 bp, Homo sapiens
tatgtaggcctgactgagggtccca

SEQ ID NO: 17387 - DNA, 25 bp, Homo sapiens
aactcatcagtgttcaaagaatatg

SEQ ID NO: 17388 - DNA, 25 bp, Homo sapiens
accgttgtcacctgttgcattaaac

SEQ ID NO: 17389 - DNA, 25 bp, Homo sapiens
atgctgggagcatgggtgagagctg

SEQ ID NO: 17390 - DNA, 25 bp, Homo sapiens
ccttccggagcatggactcgctcca

SEQ ID NO: 17391 - DNA, 25 bp, Homo sapiens
ctactgcaatttagaggggccacct

SEQ ID NO: 17392 - DNA, 25 bp, Homo sapiens
ggagcatgggtgagagctgtggtgg

SEQ ID NO: 17393 - DNA, 25 bp, Homo sapiens
gtcacctgttgcattaaacttgttt

SEQ ID NO: 17394 - DNA, 25 bp, Homo sapiens
gtgttgtaaaattcgctactgcaat

SEQ ID NO: 17395 - DNA, 25 bp, Homo sapiens
tacctcaagtgttgtaaaattcgct

SEQ ID NO: 17396 - DNA, 25 bp, Homo sapiens
ttagaggggccacctatcaactcat

SEQ ID NO: 17397 - DNA, 25 bp, Homo sapiens
ttccggagcatggactcgctccaga

SEQ ID NO: 17398 - DNA, 25 bp, Homo sapiens
aactcagcaccagggctcggtgtgt

SEQ ID NO: 17399 - DNA, 25 bp, Homo sapiens
actggagctgtcccagcgaatcagg

SEQ ID NO: 17400 - DNA, 25 bp, Homo sapiens
agggtgtccacataattgttgtaca

SEQ ID NO: 17401 - DNA, 25 bp, Homo sapiens
atggaacacattactatttctgcag

SEQ ID NO: 17402 - DNA, 25 bp, Homo sapiens
caaggagctcttggagtccaggctg

SEQ ID NO: 17403 - DNA, 25 bp, Homo sapiens
cataccagttagggcctgcggaagc

SEQ ID NO: 17404 - DNA, 25 bp, Homo sapiens
gaatcaggacgctcagtcactctga

SEQ ID NO: 17405 - DNA, 25 bp, Homo sapiens
gagtccaggctgagggtcttgaaga

SEQ ID NO: 17406 - DNA, 25 bp, Homo sapiens
gccccccgtgggacattacagaggc

SEQ ID NO: 17407 - DNA, 25 bp, Homo sapiens
ggagtgtgtgctatggaaccgcaga

SEQ ID NO: 17408 - DNA, 25 bp, Homo sapiens
tgtgaggtgttccggtccacggaaa

SEQ ID NO: 17409 - DNA, 25 bp, Homo sapiens
aagacgctgtcggttaagctgatga

SEQ ID NO: 17410 - DNA, 25 bp, Homo sapiens
aagctgatgaagaaccgcgacgagg

SEQ ID NO: 17411 - DNA, 25 bp, Homo sapiens
agcaaccacggcaagtacatcacct

SEQ ID NO: 17412 - DNA, 25 bp, Homo sapiens
cgtcgcggcgccgcgagatgcagag

SEQ ID NO: 17413 - DNA, 25 bp, Homo sapiens
ctgtgagccccgggccagagaagag

SEQ ID NO: 17414 - DNA, 25 bp, Homo sapiens
gagatgcagagccagagcgtgatgc

SEQ ID NO: 17415 - DNA, 25 bp, Homo sapiens
gagttcgtcaacattggcggcgact

SEQ ID NO: 17416 - DNA, 25 bp, Homo sapiens
gcaagctgccgcgtaagacgctgtc

SEQ ID NO: 17417 - DNA, 25 bp, Homo sapiens
gcgcctggactctgccaataaagcg

SEQ ID NO: 17418 - DNA, 25 bp, Homo sapiens
ggtgcaggccatgatttacgacgac

SEQ ID NO: 17419 - DNA, 25 bp, Homo sapiens
taaagcggaaagcgggcacgcgcag

SEQ ID NO: 17420 - DNA, 25 bp, Homo sapiens
aacagattcctcggggagttcctga

SEQ ID NO: 17421 - DNA, 25 bp, Homo sapiens
aactcactttggtatatccgcgtca

SEQ ID NO: 17422 - DNA, 25 bp, Homo sapiens
acaggagcttattggccaggaggga

SEQ ID NO: 17423 - DNA, 25 bp, Homo sapiens
agcctccacaacagaatggggccac

SEQ ID NO: 17424 - DNA, 25 bp, Homo sapiens
gaaccaggtgggcaaacctttgctt

SEQ ID NO: 17425 - DNA, 25 bp, Homo sapiens
gaggaactctgcgacgtcaaagtgt

SEQ ID NO: 17426 - DNA, 25 bp, Homo sapiens
gcctcgcacactgaagcaggggcgt

SEQ ID NO: 17427 - DNA, 25 bp, Homo sapiens
ggaagaaccacctgtcatcaaaaca

SEQ ID NO: 17428 - DNA, 25 bp, Homo sapiens
gtatatccgcgtcacatgcagagag

SEQ ID NO: 17429 - DNA, 25 bp, Homo sapiens
tgccaacctggagttcacaacacca

SEQ ID NO: 17430 - DNA, 25 bp, Homo sapiens
tttgcttatatacatgcggcctcac

SEQ ID NO: 17431 - DNA, 25 bp, Homo sapiens
agtcagctttctcggtggcagtgac

SEQ ID NO: 17432 - DNA, 25 bp, Homo sapiens
caacaccggcaaccacgatgtggcc

SEQ ID NO: 17433 - DNA, 25 bp, Homo sapiens
cagtggccataccaagtcagctttc

SEQ ID NO: 17434 - DNA, 25 bp, Homo sapiens
gagcagaacgggctcttctatgacc

SEQ ID NO: 17435 - DNA, 25 bp, Homo sapiens
gaggtatagacatgccacggcggtc

SEQ ID NO: 17436 - DNA, 25 bp, Homo sapiens
gccactacaatgcttccagcggcaa

SEQ ID NO: 17437 - DNA, 25 bp, Homo sapiens
gtttggctgcagatcttctactcag

SEQ ID NO: 17438 - DNA, 25 bp, Homo sapiens
tacgggcttcctaatctatgccgac

SEQ ID NO: 17439 - DNA, 25 bp, Homo sapiens
tcgagtgagcggttctagcctcagg

SEQ ID NO: 17440 - DNA, 25 bp, Homo sapiens
tgacccttactggacagacagcctc

SEQ ID NO: 17441 - DNA, 25 bp, Homo sapiens
tggcagtgaccaagagctacccacg

SEQ ID NO: 17442 - DNA, 25 bp, Homo sapiens
aacagctggatctcaaaacctttga

SEQ ID NO: 17443 - DNA, 25 bp, Homo sapiens
aacttggtatttactggcaggtctc

SEQ ID NO: 17444 - DNA, 25 bp, Homo sapiens
aatgactttgacaccatgcctatct

SEQ ID NO: 17445 - DNA, 25 bp, Homo sapiens
atctgcatctaaatactgtcttctt

SEQ ID NO: 17446 - DNA, 25 bp, Homo sapiens
atttctgggttcttttgcgtgatgg

SEQ ID NO: 17447 - DNA, 25 bp, Homo sapiens
gattttcattctgtctccaaactga

SEQ ID NO: 17448 - DNA, 25 bp, Homo sapiens
gcctgcccatcttaaacacaacaaa

SEQ ID NO: 17449 - DNA, 25 bp, Homo sapiens
ggaaatcctaggtttgagtggggca

SEQ ID NO: 17450 - DNA, 25 bp, Homo sapiens
ggcaggtctcaggtatttagatctt

SEQ ID NO: 17451 - DNA, 25 bp, Homo sapiens
tgaagaaggtagcctgcccatctta

SEQ ID NO: 17452 - DNA, 25 bp, Homo sapiens
tgctaagacatcggttctattgctt

SEQ ID NO: 17453 - DNA, 25 bp, Homo sapiens
ataagtccatctttgttttgtctcc

SEQ ID NO: 17454 - DNA, 25 bp, Homo sapiens
ccaccacaatctcttccatgaaaat

SEQ ID NO: 17455 - DNA, 25 bp, Homo sapiens
gaaagctactttgaccctggcaaaa

SEQ ID NO: 17456 - DNA, 25 bp, Homo sapiens
gaacccattccattctattgcattc

SEQ ID NO: 17457 - DNA, 25 bp, Homo sapiens
gatggttctatcttgatttgccttt

SEQ ID NO: 17458 - DNA, 25 bp, Homo sapiens
gcttttctgggcaaaccttcgagct

SEQ ID NO: 17459 - DNA, 25 bp, Homo sapiens
gtctcgaggttctacaatctctctg

SEQ ID NO: 17460 - DNA, 25 bp, Homo sapiens
gttggggaccacatacactgttggg

SEQ ID NO: 17461 - DNA, 25 bp, Homo sapiens
tattgcattcccaccaggtatcata

SEQ ID NO: 17462 - DNA, 25 bp, Homo sapiens
tgtctcccaactttgtccagaatga

SEQ ID NO: 17463 - DNA, 25 bp, Homo sapiens
ttatgaattttactttgcccaccac

SEQ ID NO: 17464 - DNA, 25 bp, Homo sapiens
atcgcctttaattttctatgttgta

SEQ ID NO: 17465 - DNA, 25 bp, Homo sapiens
ccgctactgcgagcatgaccagagg

SEQ ID NO: 17466 - DNA, 25 bp, Homo sapiens
cgagcatgaccagaggcgcagtgaa

SEQ ID NO: 17467 - DNA, 25 bp, Homo sapiens
gaggcgcagtgaatgcggcgccctg

SEQ ID NO: 17468 - DNA, 25 bp, Homo sapiens
gatgtgtttagtttaccgtaagctg

SEQ ID NO: 17469 - DNA, 25 bp, Homo sapiens
gctgaagcactgggtgaatattttt

SEQ ID NO: 17470 - DNA, 25 bp, Homo sapiens
gggacttgggcatcgcctttaattt

SEQ ID NO: 17471 - DNA, 25 bp, Homo sapiens
gggcatcgcctttaattttctatgt

SEQ ID NO: 17472 - DNA, 25 bp, Homo sapiens
taccgtaagctgaagcactgggtga

SEQ ID NO: 17473 - DNA, 25 bp, Homo sapiens
tagtttaccgtaagctgaagcactg

SEQ ID NO: 17474 - DNA, 25 bp, Homo sapiens
tgcggaaggccgggacttgggcatc

SEQ ID NO: 17475 - DNA, 25 bp, Homo sapiens
agctgccgggcaacgtgttgtgtaa

SEQ ID NO: 17476 - DNA, 25 bp, Homo sapiens
ctttcccatttcctaccatatatga

SEQ ID NO: 17477 - DNA, 25 bp, Homo sapiens
gagagtgaagaaccctttatgccag

SEQ ID NO: 17478 - DNA, 25 bp, Homo sapiens
gagatgtctacctaggatggcttct

SEQ ID NO: 17479 - DNA, 25 bp, Homo sapiens
gatatcttgtgtgatgccttgcagc

SEQ ID NO: 17480 - DNA, 25 bp, Homo sapiens
gatggcttctccagttaatgtcaaa

SEQ ID NO: 17481 - DNA, 25 bp, Homo sapiens
gcctggaagtagtctttgccactgc

SEQ ID NO: 17482 - DNA, 25 bp, Homo sapiens
ggaacctccagggaccaatattgtg

SEQ ID NO: 17483 - DNA, 25 bp, Homo sapiens
ggggccttgaggctgtaggatgaca

SEQ ID NO: 17484 - DNA, 25 bp, Homo sapiens
tgatcttggaatatgcacaccgcct

SEQ ID NO: 17485 - DNA, 25 bp, Homo sapiens
ttcctccacaaacagctcttcataa

SEQ ID NO: 17486 - DNA, 25 bp, Homo sapiens
aaagcaatcaattatacccaccaac

SEQ ID NO: 17487 - DNA, 25 bp, Homo sapiens
aatcataagctattcacgactcaaa

SEQ ID NO: 17488 - DNA, 25 bp, Homo sapiens
aatggatcctttttgacgatcactt

SEQ ID NO: 17489 - DNA, 25 bp, Homo sapiens
aattctatttgttgaccatttctac

SEQ ID NO: 17490 - DNA, 25 bp, Homo sapiens
cccaccaacaccactgaaatcataa

SEQ ID NO: 17491 - DNA, 25 bp, Homo sapiens
ggaattactcatatacagggtggaa

SEQ ID NO: 17492 - DNA, 25 bp, Homo sapiens
ggaattttatcctgttatcacacca

SEQ ID NO: 17493 - DNA, 25 bp, Homo sapiens
gtaaaagtccaatctgtgctaactt

SEQ ID NO: 17494 - DNA, 25 bp, Homo sapiens
tctgaatatcagcccctaataggac

SEQ ID NO: 17495 - DNA, 25 bp, Homo sapiens
tgagcatcctgaaataccaagagca

SEQ ID NO: 17496 - DNA, 25 bp, Homo sapiens
tttttgacgatcacttatatcactc

SEQ ID NO: 17497 - DNA, 25 bp, Homo sapiens
aggcatagtctgagctgacgcctct

SEQ ID NO: 17498 - DNA, 25 bp, Homo sapiens
atatgagcgaggccagctgagccca

SEQ ID NO: 17499 - DNA, 25 bp, Homo sapiens
ctgaagagaacctgcgtgctgctcc

SEQ ID NO: 17500 - DNA, 25 bp, Homo sapiens
gaaactgagtccaccacttgagaag

SEQ ID NO: 17501 - DNA, 25 bp, Homo sapiens
gagagtttatatcgtgcctttaggc

SEQ ID NO: 17502 - DNA, 25 bp, Homo sapiens
gagggaaacctgaacttttcctgca

SEQ ID NO: 17503 - DNA, 25 bp, Homo sapiens
gcaacaggatttgtctgcagcagcc

SEQ ID NO: 17504 - DNA, 25 bp, Homo sapiens
gctaccttctactggccaaagggag

SEQ ID NO: 17505 - DNA, 25 bp, Homo sapiens
ggccagcctgctggacaagcagaga

SEQ ID NO: 17506 - DNA, 25 bp, Homo sapiens
ggtaccacctctgagtcaagggttg

SEQ ID NO: 17507 - DNA, 25 bp, Homo sapiens
tcaagggttgtgtccagtgatggag

SEQ ID NO: 17508 - DNA, 25 bp, Homo sapiens
catcctgtgctcggaaatcccaaag

SEQ ID NO: 17509 - DNA, 25 bp, Homo sapiens
ccgggtgacgcccaagtgaagcgca

SEQ ID NO: 17510 - DNA, 25 bp, Homo sapiens
ctactcgaaatggcgtccgcctctg

SEQ ID NO: 17511 - DNA, 25 bp, Homo sapiens
ctcggtgacgtcttcttggggacgt

SEQ ID NO: 17512 - DNA, 25 bp, Homo sapiens
cttggggacgtatgtggccgtcttc

SEQ ID NO: 17513 - DNA, 25 bp, Homo sapiens
gagcggacctcggatggggagagac

SEQ ID NO: 17514 - DNA, 25 bp, Homo sapiens
gaggtcctgctacccagtaaaaatc

SEQ ID NO: 17515 - DNA, 25 bp, Homo sapiens
gattacgtcatccagactactcgaa

SEQ ID NO: 17516 - DNA, 25 bp, Homo sapiens
taacctcacggcccatgattacgtc

SEQ ID NO: 17517 - DNA, 25 bp, Homo sapiens
tcggatggggagagactgcgcaggc

SEQ ID NO: 17518 - DNA, 25 bp, Homo sapiens
tgaagcgcatgcgcagcgggtggtc

SEQ ID NO: 17519 - DNA, 25 bp, Homo sapiens
aacagattcatgcttgtatcttgca

SEQ ID NO: 17520 - DNA, 25 bp, Homo sapiens
aactgtcctactaatcaaagctgca

SEQ ID NO: 17521 - DNA, 25 bp, Homo sapiens
aagaaggcagacttcatattctcat

SEQ ID NO: 17522 - DNA, 25 bp, Homo sapiens
aggattgttttcactaggcttacca

SEQ ID NO: 17523 - DNA, 25 bp, Homo sapiens
atccattgcatgttgaactccttta

SEQ ID NO: 17524 - DNA, 25 bp, Homo sapiens
cagtgtaattattgggcttttgcct

SEQ ID NO: 17525 - DNA, 25 bp, Homo sapiens
gggcttttgccttatgttgagttca

SEQ ID NO: 17526 - DNA, 25 bp, Homo sapiens
gtccttaataaataggcccatgtaa

SEQ ID NO: 17527 - DNA, 25 bp, Homo sapiens
taggcttaccattttgctttgcttt

SEQ ID NO: 17528 - DNA, 25 bp, Homo sapiens
tgcttttttaacacactgagccaaa

SEQ ID NO: 17529 - DNA, 25 bp, Homo sapiens
ttggcaatctgaaactggcaaacac

SEQ ID NO: 17530 - DNA, 25 bp, Homo sapiens
aacaccagggcaaccacatgacggt

SEQ ID NO: 17531 - DNA, 25 bp, Homo sapiens
agctcacagacgctcttgttgtgcc

SEQ ID NO: 17532 - DNA, 25 bp, Homo sapiens
ctacctgcaagccctaaacatcagc

SEQ ID NO: 17533 - DNA, 25 bp, Homo sapiens
gacctcaggagcgtggacggacgaa

SEQ ID NO: 17534 - DNA, 25 bp, Homo sapiens
gatgcagtgtgcgagcaggtcttca

SEQ ID NO: 17535 - DNA, 25 bp, Homo sapiens
gctgtatctggaactgactgcaagg

SEQ ID NO: 17536 - DNA, 25 bp, Homo sapiens
gtccccaaccggggctggagacact

SEQ ID NO: 17537 - DNA, 25 bp, Homo sapiens
tcacactccactgcccaatagtgac

SEQ ID NO: 17538 - DNA, 25 bp, Homo sapiens
tcagcaccttccgaaactacactgt

SEQ ID NO: 17539 - DNA, 25 bp, Homo sapiens
tcagcttggctgtgcggaagatcgc

SEQ ID NO: 17540 - DNA, 25 bp, Homo sapiens
tgacggtgaggacgctcagcacctt

SEQ ID NO: 17541 - DNA, 25 bp, Homo sapiens
aaagcccaggatgaccaagaatata

SEQ ID NO: 17542 - DNA, 25 bp, Homo sapiens
aagcatcaccttaagcacatattat

SEQ ID NO: 17543 - DNA, 25 bp, Homo sapiens
accatcctacgaggtcacactttgt

SEQ ID NO: 17544 - DNA, 25 bp, Homo sapiens
atgccttgagacactagccaattgt

SEQ ID NO: 17545 - DNA, 25 bp, Homo sapiens
cacactttgttttcacataatcgga

SEQ ID NO: 17546 - DNA, 25 bp, Homo sapiens
cacatattatgccttgagacactag

SEQ ID NO: 17547 - DNA, 25 bp, Homo sapiens
gaatttgtttactatccttaatggt

SEQ ID NO: 17548 - DNA, 25 bp, Homo sapiens
gacactagccaattgtggtacatga

SEQ ID NO: 17549 - DNA, 25 bp, Homo sapiens
gccagccataaagcccaggatgacc

SEQ ID NO: 17550 - DNA, 25 bp, Homo sapiens
tatccttaatggtaagcatcacctt

SEQ ID NO: 17551 - DNA, 25 bp, Homo sapiens
tatgaagccagccataaagcccagg

SEQ ID NO: 17552 - DNA, 25 bp, Homo sapiens
aaaattcatgatttcttcctgaagc

SEQ ID NO: 17553 - DNA, 25 bp, Homo sapiens
aatccaaccagaatctcgctctgca

SEQ ID NO: 17554 - DNA, 25 bp, Homo sapiens
aatcttaccaatagtctgtgtcaac

SEQ ID NO: 17555 - DNA, 25 bp, Homo sapiens
acaactcatgctaggaggccagtcc

SEQ ID NO: 17556 - DNA, 25 bp, Homo sapiens
accagatctttactcacaactcatg

SEQ ID NO: 17557 - DNA, 25 bp, Homo sapiens
agcagacatcattcaatccaaccag

SEQ ID NO: 17558 - DNA, 25 bp, Homo sapiens
cagtcctagcatcaccttatgttga

SEQ ID NO: 17559 - DNA, 25 bp, Homo sapiens
gaacagcaggagtctctagatcaga

SEQ ID NO: 17560 - DNA, 25 bp, Homo sapiens
gattcccatctaccctgatgatgca

SEQ ID NO: 17561 - DNA, 25 bp, Homo sapiens
gtggcttcaacagcaattagttcat

SEQ ID NO: 17562 - DNA, 25 bp, Homo sapiens
taaagctgcacaggattcccatcta

SEQ ID NO: 17563 - DNA, 25 bp, Homo sapiens
aaccatgatgtggcttcggggtcca

SEQ ID NO: 17564 - DNA, 25 bp, Homo sapiens
aggttgggcagacagcttattctcc

SEQ ID NO: 17565 - DNA, 25 bp, Homo sapiens
agtctggctggagattttcttcaca

SEQ ID NO: 17566 - DNA, 25 bp, Homo sapiens
ccacagtcatctatctgcagccaga

SEQ ID NO: 17567 - DNA, 25 bp, Homo sapiens
gacacagattacctagattccatat

SEQ ID NO: 17568 - DNA, 25 bp, Homo sapiens
gatccaaagagactcccactcagat

SEQ ID NO: 17569 - DNA, 25 bp, Homo sapiens
gatccctgtggtaaacactctgatt

SEQ ID NO: 17570 - DNA, 25 bp, Homo sapiens
taccggataaagaccttcgacgcca

SEQ ID NO: 17571 - DNA, 25 bp, Homo sapiens
tccgggtttctcttatacgttgaca

SEQ ID NO: 17572 - DNA, 25 bp, Homo sapiens
tcgacgccaacacaggaaaccatga

SEQ ID NO: 17573 - DNA, 25 bp, Homo sapiens
ttcacagaccagaatggcctcttct

SEQ ID NO: 17574 - DNA, 25 bp, Homo sapiens
agggaaacgatccttattgcctcac

SEQ ID NO: 17575 - DNA, 25 bp, Homo sapiens
caccatttcccacgtgaagtctgta

SEQ ID NO: 17576 - DNA, 25 bp, Homo sapiens
caggtctatttgtctccctgttaca

SEQ ID NO: 17577 - DNA, 25 bp, Homo sapiens
gacggcgaagtttgacggtctggaa

SEQ ID NO: 17578 - DNA, 25 bp, Homo sapiens
gagaccagcagggctgactgcttgg

SEQ ID NO: 17579 - DNA, 25 bp, Homo sapiens
ggagcaccaaatatccggacagcgc

SEQ ID NO: 17580 - DNA, 25 bp, Homo sapiens
gtattgacattctcatagacctggg

SEQ ID NO: 17581 - DNA, 25 bp, Homo sapiens
gtgtctgcagcacatagtccaatta

SEQ ID NO: 17582 - DNA, 25 bp, Homo sapiens
gttacactgtgagctccgtgagggc

SEQ ID NO: 17583 - DNA, 25 bp, Homo sapiens
gttggcgcatggacattttcccaga

SEQ ID NO: 17584 - DNA, 25 bp, Homo sapiens
tgaggctggtttgcaggttggcgca

SEQ ID NO: 17585 - DNA, 25 bp, Homo sapiens
acagtctagagtacagtccctctcc

SEQ ID NO: 17586 - DNA, 25 bp, Homo sapiens
actgccagtgcagtgtggtggactg

SEQ ID NO: 17587 - DNA, 25 bp, Homo sapiens
cagtccctctcctataagcaagaag

SEQ ID NO: 17588 - DNA, 25 bp, Homo sapiens
ccattcctgattcttgggtaataaa

SEQ ID NO: 17589 - DNA, 25 bp, Homo sapiens
gaagatcaaggatgttctcaacagt

SEQ ID NO: 17590 - DNA, 25 bp, Homo sapiens
gccactgccagtgcagtgtggtgga

SEQ ID NO: 17591 - DNA, 25 bp, Homo sapiens
ggatgttctcaacagtctagagtac

SEQ ID NO: 17592 - DNA, 25 bp, Homo sapiens
gttccattcctgattcttgggtaat

SEQ ID NO: 17593 - DNA, 25 bp, Homo sapiens
tcatttgttccattcctgattcttg

SEQ ID NO: 17594 - DNA, 25 bp, Homo sapiens
tgccacctgacctgacagggaggag

SEQ ID NO: 17595 - DNA, 25 bp, Homo sapiens
tttgttccattcctgattcttgggt

SEQ ID NO: 17596 - DNA, 25 bp, Homo sapiens
agaagcctgggtcattgttcgcagc

SEQ ID NO: 17597 - DNA, 25 bp, Homo sapiens
atccttatcgatgaagccacagcct

SEQ ID NO: 17598 - DNA, 25 bp, Homo sapiens
caatccgtgaagccttccagggctg

SEQ ID NO: 17599 - DNA, 25 bp, Homo sapiens
catggagacagacaccctgatccag

SEQ ID NO: 17600 - DNA, 25 bp, Homo sapiens
cgcaactccaagatcatccttatcg

SEQ ID NO: 17601 - DNA, 25 bp, Homo sapiens
ctgatccagcgcacaatccgtgaag

SEQ ID NO: 17602 - DNA, 25 bp, Homo sapiens
gaaaacggtggaaacttctctgtgg

SEQ ID NO: 17603 - DNA, 25 bp, Homo sapiens
gaatttgatcggccggaggtactgc

SEQ ID NO: 17604 - DNA, 25 bp, Homo sapiens
gatggctctcaagaccttagaaccc

SEQ ID NO: 17605 - DNA, 25 bp, Homo sapiens
gattgctggatggaaaccctggaat

SEQ ID NO: 17606 - DNA, 25 bp, Homo sapiens
ggaataggctacttgatggctctca

SEQ ID NO: 17607 - DNA, 25 bp, Homo sapiens
agttcaacaagttcgacctctacac

SEQ ID NO: 17608 - DNA, 25 bp, Homo sapiens
cagagctcgggatgtatcagcccca

SEQ ID NO: 17609 - DNA, 25 bp, Homo sapiens
catcagggttcacctcggtggggga

SEQ ID NO: 17610 - DNA, 25 bp, Homo sapiens
ccctgaggctttctacatgatccgg

SEQ ID NO: 17611 - DNA, 25 bp, Homo sapiens
gaagtttaacaagttctcactgccc

SEQ ID NO: 17612 - DNA, 25 bp, Homo sapiens
gccctactaccaggggctcattgac

SEQ ID NO: 17613 - DNA, 25 bp, Homo sapiens
ggatcctcgatacagcacagagctc

SEQ ID NO: 17614 - DNA, 25 bp, Homo sapiens
ggctcattgacaagtactgccctgg

SEQ ID NO: 17615 - DNA, 25 bp, Homo sapiens
gtgcctggcgtcaataaagacctgg

SEQ ID NO: 17616 - DNA, 25 bp, Homo sapiens
tcctcatgtcctggggccatgatga

SEQ ID NO: 17617 - DNA, 25 bp, Homo sapiens
tgccctgggtgcgggagttcaacaa

SEQ ID NO: 17618 - DNA, 25 bp, Homo sapiens
atgagccactcctcagtgatggtgc

SEQ ID NO: 17619 - DNA, 25 bp, Homo sapiens
ctctagcctttgatttttaactcca

SEQ ID NO: 17620 - DNA, 25 bp, Homo sapiens
ggagaccctggggacttcagtgaca

SEQ ID NO: 17621 - DNA, 25 bp, Homo sapiens
ggttacagtcttcttcataccttga

SEQ ID NO: 17622 - DNA, 25 bp, Homo sapiens
gtgatggtgcacagttggatttcga

SEQ ID NO: 17623 - DNA, 25 bp, Homo sapiens
tatagatttgcatcttcctgtcaca

SEQ ID NO: 17624 - DNA, 25 bp, Homo sapiens
tgggggagctagaggctaccaggca

SEQ ID NO: 17625 - DNA, 25 bp, Homo sapiens
ttgtttccaccaagtccttctgaaa

SEQ ID NO: 17626 - DNA, 25 bp, Homo sapiens
aagaaacaattcacttaccagcctc

SEQ ID NO: 17627 - DNA, 25 bp, Homo sapiens
actcctgatcgctactcttaagaat

SEQ ID NO: 17628 - DNA, 25 bp, Homo sapiens
cagtgatttacctgtccatttccaa

SEQ ID NO: 17629 - DNA, 25 bp, Homo sapiens
ctccaccatttccttaatgttccat

SEQ ID NO: 17630 - DNA, 25 bp, Homo sapiens
gaggagttactttgtggatcttgtc

SEQ ID NO: 17631 - DNA, 25 bp, Homo sapiens
gattcgcttactgttattgtgctga

SEQ ID NO: 17632 - DNA, 25 bp, Homo sapiens
gctcctgtgtgcttcagacaaaaat

SEQ ID NO: 17633 - DNA, 25 bp, Homo sapiens
gttattcttagcttacctgttatgt

SEQ ID NO: 17634 - DNA, 25 bp, Homo sapiens
ttccaacccaaaagcctgtcagaaa

SEQ ID NO: 17635 - DNA, 25 bp, Homo sapiens
ttccaagagggctttcacagtccac

SEQ ID NO: 17636 - DNA, 25 bp, Homo sapiens
ttgttgttaaactcctgatcgctac

SEQ ID NO: 17637 - DNA, 25 bp, Homo sapiens
agacccagctcagtgactggcacac

SEQ ID NO: 17638 - DNA, 25 bp, Homo sapiens
cagctcagtgactggcacacaggtc

SEQ ID NO: 17639 - DNA, 25 bp, Homo sapiens
catctccgacgactttggcgagtgc

SEQ ID NO: 17640 - DNA, 25 bp, Homo sapiens
cctctgccagatggcgcgggaactg

SEQ ID NO: 17641 - DNA, 25 bp, Homo sapiens
ctaccagacccagctcagtgactgg

SEQ ID NO: 17642 - DNA, 25 bp, Homo sapiens
ctgccagatggcgcgggaactgaag

SEQ ID NO: 17643 - DNA, 25 bp, Homo sapiens
gagagtaaggaagttccctgtcttc

SEQ ID NO: 17644 - DNA, 25 bp, Homo sapiens
gctgccagaaatacacccacaataa

SEQ ID NO: 17645 - DNA, 25 bp, Homo sapiens
ggcgcgggaactgaagatccgagag

SEQ ID NO: 17646 - DNA, 25 bp, Homo sapiens
gggaactgaagatccgagagtaagg

SEQ ID NO: 17647 - DNA, 25 bp, Homo sapiens
tgcaacgacatgcctgtctgtctgt

SEQ ID NO: 17648 - DNA, 25 bp, Homo sapiens
atgtatcctggtaccaacaactccc

SEQ ID NO: 17649 - DNA, 25 bp, Homo sapiens
catctcctgctctggaagcagctcc

SEQ ID NO: 17650 - DNA, 25 bp, Homo sapiens
ccaggacagaaggtcgccatctcct

SEQ ID NO: 17651 - DNA, 25 bp, Homo sapiens
cccccaaactcctcatttatgacaa

SEQ ID NO: 17652 - DNA, 25 bp, Homo sapiens
gcggaacatgggatagcagcctgag

SEQ ID NO: 17653 - DNA, 25 bp, Homo sapiens
ggaagcagctccaacattgggaata

SEQ ID NO: 17654 - DNA, 25 bp, Homo sapiens
taagcgaccctcagggattcctggc

SEQ ID NO: 17655 - DNA, 25 bp, Homo sapiens
tatctgcggccccaggacagaaggt

SEQ ID NO: 17656 - DNA, 25 bp, Homo sapiens
tcaccggactccagactggggacga

SEQ ID NO: 17657 - DNA, 25 bp, Homo sapiens
tggtaccaacaactcccaggaacag

SEQ ID NO: 17658 - DNA, 25 bp, Homo sapiens
aaaccatgctgtttctctatcaaga

SEQ ID NO: 17659 - DNA, 25 bp, Homo sapiens
acattcaatcttcactctttcaatt

SEQ ID NO: 17660 - DNA, 25 bp, Homo sapiens
caagagggactccctagggcacatg

SEQ ID NO: 17661 - DNA, 25 bp, Homo sapiens
cacacacacattcgtgtgctctgct

SEQ ID NO: 17662 - DNA, 25 bp, Homo sapiens
cataacccaggtcgttcctgttctg

SEQ ID NO: 17663 - DNA, 25 bp, Homo sapiens
cctttctgggcttccataacccagg

SEQ ID NO: 17664 - DNA, 25 bp, Homo sapiens
gcacatatgtgggcatccagcctct

SEQ ID NO: 17665 - DNA, 25 bp, Homo sapiens
ggtgacctcaccaccaagttattcc

SEQ ID NO: 17666 - DNA, 25 bp, Homo sapiens
gtgctctgctgcatgtgagcttgtg

SEQ ID NO: 17667 - DNA, 25 bp, Homo sapiens
tctggaagcatctttcactgggacc

SEQ ID NO: 17668 - DNA, 25 bp, Homo sapiens
tgacagctgaggaaacgtctctccc

SEQ ID NO: 17669 - DNA, 25 bp, Homo sapiens
cgattacaatgctctcagtgtctgc

SEQ ID NO: 17670 - DNA, 25 bp, Homo sapiens
gcagacaaagtcgtcttccttcttt

SEQ ID NO: 17671 - DNA, 25 bp, Homo sapiens
gcagagatgggtccagtgcagtggc

SEQ ID NO: 17672 - DNA, 25 bp, Homo sapiens
gctttctgtgcagaacttctccatg

SEQ ID NO: 17673 - DNA, 25 bp, Homo sapiens
ggttcttgtggtttacccatctgaa

SEQ ID NO: 17674 - DNA, 25 bp, Homo sapiens
gtgtgtgcgatggtacctgtggcaa

SEQ ID NO: 17675 - DNA, 25 bp, Homo sapiens
tgccccccattaaggttcttgtggt

SEQ ID NO: 17676 - DNA, 25 bp, Homo sapiens
ttccttctttccaatgacgtcaaca

SEQ ID NO: 17677 - DNA, 25 bp, Homo sapiens
attaccagcttctaaatgaatgttg

SEQ ID NO: 17678 - DNA, 25 bp, Homo sapiens
cacatttgtggtgtacctttgtcgt

SEQ ID NO: 17679 - DNA, 25 bp, Homo sapiens
cctatttcttgtgggtctcctatta

SEQ ID NO: 17680 - DNA, 25 bp, Homo sapiens
cctgcttcctaaacttacacatttg

SEQ ID NO: 17681 - DNA, 25 bp, Homo sapiens
gatgggacataatgcataggcttgg

SEQ ID NO: 17682 - DNA, 25 bp, Homo sapiens
gttacctatttcttgtgggtctcct

SEQ ID NO: 17683 - DNA, 25 bp, Homo sapiens
gtttctgtcagcaggagagttttac

SEQ ID NO: 17684 - DNA, 25 bp, Homo sapiens
tgaagttaatagggagacccctgct

SEQ ID NO: 17685 - DNA, 25 bp, Homo sapiens
tggccctacctttgaatgttagtga

SEQ ID NO: 17686 - DNA, 25 bp, Homo sapiens
tgtcgtaaacgttttgatgttacct

SEQ ID NO: 17687 - DNA, 25 bp, Homo sapiens
tgtggtgtacctttgtcgtaaacgt

SEQ ID NO: 17688 - DNA, 25 bp, Homo sapiens
aaacctgagatttctccgtggacct

SEQ ID NO: 17689 - DNA, 25 bp, Homo sapiens
agaccctctctaaagactgttccat

SEQ ID NO: 17690 - DNA, 25 bp, Homo sapiens
attcagcaagtcaggggcttcctct

SEQ ID NO: 17691 - DNA, 25 bp, Homo sapiens
ggatcctgggctcagaatctcgaga

SEQ ID NO: 17692 - DNA, 25 bp, Homo sapiens
ggcacctcactagcatttatcactt

SEQ ID NO: 17693 - DNA, 25 bp, Homo sapiens
gtcaaccactgtgtgctcagagggt

SEQ ID NO: 17694 - DNA, 25 bp, Homo sapiens
gtggacctgacagccaaggcagggc

SEQ ID NO: 17695 - DNA, 25 bp, Homo sapiens
taacatgtcctgattctgcatccgt

SEQ ID NO: 17696 - DNA, 25 bp, Homo sapiens
tgccagcacgtgcatggttcacaga

SEQ ID NO: 17697 - DNA, 25 bp, Homo sapiens
tgcccttgctttctagggcatccct

SEQ ID NO: 17698 - DNA, 25 bp, Homo sapiens
tgctgtgtttttcttgagtccttgc

SEQ ID NO: 17699 - DNA, 25 bp, Homo sapiens
aaactgacctcagttcctaaaggct

SEQ ID NO: 17700 - DNA, 25 bp, Homo sapiens
atcccttcaggattaccagagttga

SEQ ID NO: 17701 - DNA, 25 bp, Homo sapiens
atcttccttcattctaattcaattg

SEQ ID NO: 17702 - DNA, 25 bp, Homo sapiens
atgacttctgtccaacagtgccaaa

SEQ ID NO: 17703 - DNA, 25 bp, Homo sapiens
caaagaactacaaaggctgggccta

SEQ ID NO: 17704 - DNA, 25 bp, Homo sapiens
gaatgaatgctttacacgttttgga

SEQ ID NO: 17705 - DNA, 25 bp, Homo sapiens
gagccaggggcatttgaaggggtga

SEQ ID NO: 17706 - DNA, 25 bp, Homo sapiens
gcaacctgcaacatttcgttgtgtt

SEQ ID NO: 17707 - DNA, 25 bp, Homo sapiens
ggaaatgagtgcaaaccctcttgat

SEQ ID NO: 17708 - DNA, 25 bp, Homo sapiens
ggcttaccaccaactttattggagc

SEQ ID NO: 17709 - DNA, 25 bp, Homo sapiens
ggtgacggtgttccatatcagaatt

SEQ ID NO: 17710 - DNA, 25 bp, Homo sapiens
aaaaactagtctgtggttctttgca

SEQ ID NO: 17711 - DNA, 25 bp, Homo sapiens
agcagtttgttaacctgacatctct

SEQ ID NO: 17712 - DNA, 25 bp, Homo sapiens
cccctcctctttgcattaatcaagg

SEQ ID NO: 17713 - DNA, 25 bp, Homo sapiens
ctgacatctctgccagtctagtttc

SEQ ID NO: 17714 - DNA, 25 bp, Homo sapiens
gcaaagtttatttcagttcacatgt

SEQ ID NO: 17715 - DNA, 25 bp, Homo sapiens
gcaggtttcctgtgtcagtattccc

SEQ ID NO: 17716 - DNA, 25 bp, Homo sapiens
ggttctttgcagtttcttgtaaatt

SEQ ID NO: 17717 - DNA, 25 bp, Homo sapiens
gtctagtttctgggcaggtttcctg

SEQ ID NO: 17718 - DNA, 25 bp, Homo sapiens
gtgcctttttggagatgtaactttt

SEQ ID NO: 17719 - DNA, 25 bp, Homo sapiens
gtttgtatgtccaatttacttgcat

SEQ ID NO: 17720 - DNA, 25 bp, Homo sapiens
tgtaaaccattgctgtgccattcaa

SEQ ID NO: 17721 - DNA, 25 bp, Homo sapiens
aagttggccacttcttgaagattca

SEQ ID NO: 17722 - DNA, 25 bp, Homo sapiens
agggtgccaagagatgcctttctga

SEQ ID NO: 17723 - DNA, 25 bp, Homo sapiens
agtctgacccacccagtgagggtgc

SEQ ID NO: 17724 - DNA, 25 bp, Homo sapiens
atatgcccaacgaggcaggaccatg

SEQ ID NO: 17725 - DNA, 25 bp, Homo sapiens
atttagacatggttgcctgcaggta

SEQ ID NO: 17726 - DNA, 25 bp, Homo sapiens
ctgataaaagccgtgcagtgcccgg

SEQ ID NO: 17727 - DNA, 25 bp, Homo sapiens
gcctgcaggtatttcactgtttact

SEQ ID NO: 17728 - DNA, 25 bp, Homo sapiens
ggcaggaccatgtggatagattcca

SEQ ID NO: 17729 - DNA, 25 bp, Homo sapiens
gtgagggtgcatttgaacactgatt

SEQ ID NO: 17730 - DNA, 25 bp, Homo sapiens
tagattccatttgtttccttgacct

SEQ ID NO: 17731 - DNA, 25 bp, Homo sapiens
ttgtgttagagcttgtgactgccaa

SEQ ID NO: 17732 - DNA, 25 bp, Homo sapiens
aagtggttccttggcagactgcctt

SEQ ID NO: 17733 - DNA, 25 bp, Homo sapiens
atagggctagacactttgaggcaag

SEQ ID NO: 17734 - DNA, 25 bp, Homo sapiens
cctcagcaccttcgaagtggttcct

SEQ ID NO: 17735 - DNA, 25 bp, Homo sapiens
ctggaagagggcacgggcgatcccg

SEQ ID NO: 17736 - DNA, 25 bp, Homo sapiens
gaggctctgcctaatgtgaatttat

SEQ ID NO: 17737 - DNA, 25 bp, Homo sapiens
gatgcagacacggacgcaggctgag

SEQ ID NO: 17738 - DNA, 25 bp, Homo sapiens
gcagactgcctttcctggaagaggg

SEQ ID NO: 17739 - DNA, 25 bp, Homo sapiens
gctgcctgaggagcccaagtgacaa

SEQ ID NO: 17740 - DNA, 25 bp, Homo sapiens
gggcaggcgatggagccaagcccac

SEQ ID NO: 17741 - DNA, 25 bp, Homo sapiens
gtgacaagggacaactgacgccgtc

SEQ ID NO: 17742 - DNA, 25 bp, Homo sapiens
tctctgtgagcaccgaggctttttg

SEQ ID NO: 17743 - DNA, 25 bp, Homo sapiens
aacaggcttagctttagtgctgggg

SEQ ID NO: 17744 - DNA, 25 bp, Homo sapiens
aataccaactgatgtcacggagcgg

SEQ ID NO: 17745 - DNA, 25 bp, Homo sapiens
actctgtgggattcaacttgacttt

SEQ ID NO: 17746 - DNA, 25 bp, Homo sapiens
agggtttgttagatggcctctgact

SEQ ID NO: 17747 - DNA, 25 bp, Homo sapiens
cctcatgcccaagggtttgttagat

SEQ ID NO: 17748 - DNA, 25 bp, Homo sapiens
ctggtgtctagaacagctgcgggcc

SEQ ID NO: 17749 - DNA, 25 bp, Homo sapiens
gacggtgcattgccaaggactcaca

SEQ ID NO: 17750 - DNA, 25 bp, Homo sapiens
gtcttctgaggcctacgtggaatga

SEQ ID NO: 17751 - DNA, 25 bp, Homo sapiens
gtgctcagaccagagtgccattaaa

SEQ ID NO: 17752 - DNA, 25 bp, Homo sapiens
tcacggagcggacggtgcattgcca

SEQ ID NO: 17753 - DNA, 25 bp, Homo sapiens
ttgaggccaccacatctggtgtcta

SEQ ID NO: 17754 - DNA, 25 bp, Homo sapiens
aagaagaccatgctgggaccttcca

SEQ ID NO: 17755 - DNA, 25 bp, Homo sapiens
agctaccgcgtaacactttcagctg

SEQ ID NO: 17756 - DNA, 25 bp, Homo sapiens
aggaagaagaccatgctgggacctt

SEQ ID NO: 17757 - DNA, 25 bp, Homo sapiens
cagctaccgcgtaacactttcagct

SEQ ID NO: 17758 - DNA, 25 bp, Homo sapiens
ccgacgagaccctggacaaagtgcc

SEQ ID NO: 17759 - DNA, 25 bp, Homo sapiens
gacttctacaagccgggaaccagct

SEQ ID NO: 17760 - DNA, 25 bp, Homo sapiens
gattcacattaattgccctcagaga

SEQ ID NO: 17761 - DNA, 25 bp, Homo sapiens
tcacattaattgccctcagagagaa

SEQ ID NO: 17762 - DNA, 25 bp, Homo sapiens
tcctccctcctacttcagaggattc

SEQ ID NO: 17763 - DNA, 25 bp, Homo sapiens
tgaagctgagccggactccggcact

SEQ ID NO: 17764 - DNA, 25 bp, Homo sapiens
ttctccgacgagaccctggacaaag

SEQ ID NO: 17765 - DNA, 25 bp, Homo sapiens
atccaatcatgcgctgtatgtttta

SEQ ID NO: 17766 - DNA, 25 bp, Homo sapiens
atggtcaccttcaagctactttaat

SEQ ID NO: 17767 - DNA, 25 bp, Homo sapiens
cacccacaaacttcacatatcataa

SEQ ID NO: 17768 - DNA, 25 bp, Homo sapiens
gaaaatctattggctctcgtgggtc

SEQ ID NO: 17769 - DNA, 25 bp, Homo sapiens
gaccatgcatggtcaccttcaagct

SEQ ID NO: 17770 - DNA, 25 bp, Homo sapiens
gccaatcaggtcaaggtttgctaca

SEQ ID NO: 17771 - DNA, 25 bp, Homo sapiens
ggaagttgcttgaatgttggggaga

SEQ ID NO: 17772 - DNA, 25 bp, Homo sapiens
ggcacacgctcatagttctagctgc

SEQ ID NO: 17773 - DNA, 25 bp, Homo sapiens
gggtctcttcatctcagaaatgcca

SEQ ID NO: 17774 - DNA, 25 bp, Homo sapiens
gtagcaaatcttctggaaacgcaaa

SEQ ID NO: 17775 - DNA, 25 bp, Homo sapiens
taaagctgcgaaccgtggcacacgc

SEQ ID NO: 17776 - DNA, 25 bp, Homo sapiens
aagtcacccgttttggatgtgcatt

SEQ ID NO: 17777 - DNA, 25 bp, Homo sapiens
acaccagcctgcgagatgcttttgt

SEQ ID NO: 17778 - DNA, 25 bp, Homo sapiens
acctactgcctgatgcaggtgccat

SEQ ID NO: 17779 - DNA, 25 bp, Homo sapiens
attggttcctcaagtgcgttttggg

SEQ ID NO: 17780 - DNA, 25 bp, Homo sapiens
cacactctgtccccaagttggacat

SEQ ID NO: 17781 - DNA, 25 bp, Homo sapiens
cagcttagggcagcactttccaacg

SEQ ID NO: 17782 - DNA, 25 bp, Homo sapiens
ccggactccgtgtgacctaataggt

SEQ ID NO: 17783 - DNA, 25 bp, Homo sapiens
cttgctaaaccttctttaacccatg

SEQ ID NO: 17784 - DNA, 25 bp, Homo sapiens
gccattgccattagcggtcatcgac

SEQ ID NO: 17785 - DNA, 25 bp, Homo sapiens
taaagggcctggggtgtgagctgac

SEQ ID NO: 17786 - DNA, 25 bp, Homo sapiens
tttccaacgggtgcccatgggacac

SEQ ID NO: 17787 - DNA, 25 bp, Homo sapiens
aacgcgtggcctatgcaggtggatt

SEQ ID NO: 17788 - DNA, 25 bp, Homo sapiens
acaggttaagaagagccgggtggca

SEQ ID NO: 17789 - DNA, 25 bp, Homo sapiens
catcagctgtaatcattcctgtgct

SEQ ID NO: 17790 - DNA, 25 bp, Homo sapiens
cccttggtaggtattagacttgcac

SEQ ID NO: 17791 - DNA, 25 bp, Homo sapiens
gaagccgctcaaataccttcacaat

SEQ ID NO: 17792 - DNA, 25 bp, Homo sapiens
gaggaagccgctcaaataccttcac

SEQ ID NO: 17793 - DNA, 25 bp, Homo sapiens
ggcctatgcaggtggattccttcag

SEQ ID NO: 17794 - DNA, 25 bp, Homo sapiens
gtggcagctgacagaggaagccgct

SEQ ID NO: 17795 - DNA, 25 bp, Homo sapiens
gttaagaagagccgggtggcagctg

SEQ ID NO: 17796 - DNA, 25 bp, Homo sapiens
tgcaggtggattccttcaggtcttt

SEQ ID NO: 17797 - DNA, 25 bp, Homo sapiens
ttgtttttgacatcagctgtaatca

SEQ ID NO: 17798 - DNA, 25 bp, Homo sapiens
agttctttactttttacatgctgac

SEQ ID NO: 17799 - DNA, 25 bp, Homo sapiens
atttctctaaatgtaggcctggctg

SEQ ID NO: 17800 - DNA, 25 bp, Homo sapiens
caatcctcagataacgcatagcaaa

SEQ ID NO: 17801 - DNA, 25 bp, Homo sapiens
cactgcctaaatagatctctttcag

SEQ ID NO: 17802 - DNA, 25 bp, Homo sapiens
cagcttctctaattataccttagaa

SEQ ID NO: 17803 - DNA, 25 bp, Homo sapiens
ctaaatgtaggcctggctgggcttt

SEQ ID NO: 17804 - DNA, 25 bp, Homo sapiens
gatttctcatgcaacagcttctcta

SEQ ID NO: 17805 - DNA, 25 bp, Homo sapiens
tataccttagaaatgttctcctttt

SEQ ID NO: 17806 - DNA, 25 bp, Homo sapiens
tgaaaacagcttaacattttaccat

SEQ ID NO: 17807 - DNA, 25 bp, Homo sapiens
ttacaaggtttgtctattttcagtt

SEQ ID NO: 17808 - DNA, 25 bp, Homo sapiens
tttttatcatcaaatctgctcaaga

SEQ ID NO: 17809 - DNA, 25 bp, Homo sapiens
aaaatgctttggtggcacttttgta

SEQ ID NO: 17810 - DNA, 25 bp, Homo sapiens
acagattgcttctagattgttacaa

SEQ ID NO: 17811 - DNA, 25 bp, Homo sapiens
accacacacctaaacctgtattatg

SEQ ID NO: 17812 - DNA, 25 bp, Homo sapiens
agcaggcttatgtttggtggcatta

SEQ ID NO: 17813 - DNA, 25 bp, Homo sapiens
gactttatacttaacatcagatctt

SEQ ID NO: 17814 - DNA, 25 bp, Homo sapiens
gatcttttctataatatcctactac

SEQ ID NO: 17815 - DNA, 25 bp, Homo sapiens
gattgttacaaaccaagcctaagac

SEQ ID NO: 17816 - DNA, 25 bp, Homo sapiens
ggatatacagtacattctagttgga

SEQ ID NO: 17817 - DNA, 25 bp, Homo sapiens
gttggaatcgtttactctgctagaa

SEQ ID NO: 17818 - DNA, 25 bp, Homo sapiens
tcctactactttggttttcctagct

SEQ ID NO: 17819 - DNA, 25 bp, Homo sapiens
ttgtttcccaggtatagcaggctta

SEQ ID NO: 17820 - DNA, 25 bp, Homo sapiens
aactctgcaaggctaaactgtcatt

SEQ ID NO: 17821 - DNA, 25 bp, Homo sapiens
acagcagcgctgtgattcgcgtagc

SEQ ID NO: 17822 - DNA, 25 bp, Homo sapiens
cccccttccaaattctgtaacacat

SEQ ID NO: 17823 - DNA, 25 bp, Homo sapiens
gaaagcgcagggggatggcccccgg

SEQ ID NO: 17824 - DNA, 25 bp, Homo sapiens
gactctagtcagttttgtctccaga

SEQ ID NO: 17825 - DNA, 25 bp, Homo sapiens
gcggcgctgttggcgacagcagcgc

SEQ ID NO: 17826 - DNA, 25 bp, Homo sapiens
gtctccagaaccttaggcttttgta

SEQ ID NO: 17827 - DNA, 25 bp, Homo sapiens
tagtccggccttgtcaatgagtgct

SEQ ID NO: 17828 - DNA, 25 bp, Homo sapiens
tgaaacaccttcctgagtagtccgg

SEQ ID NO: 17829 - DNA, 25 bp, Homo sapiens
tgtggggtccgtttaactcgataga

SEQ ID NO: 17830 - DNA, 25 bp, Homo sapiens
tttactcgtcactttcaaaccagaa

SEQ ID NO: 17831 - DNA, 25 bp, Homo sapiens
aaataacatcgtctgtactttctgt

SEQ ID NO: 17832 - DNA, 25 bp, Homo sapiens
gagtgatgcttatgttaagtcctaa

SEQ ID NO: 17833 - DNA, 25 bp, Homo sapiens
gtatgggtattatgttgctcagtta

SEQ ID NO: 17834 - DNA, 25 bp, Homo sapiens
gtgtaatctctgccttttaagatat

SEQ ID NO: 17835 - DNA, 25 bp, Homo sapiens
gttactcaaatggtactgtattgtt

SEQ ID NO: 17836 - DNA, 25 bp, Homo sapiens
gttgctcagttactcaaatggtact

SEQ ID NO: 17837 - DNA, 25 bp, Homo sapiens
tgatactgagaagcctgtaaagagg

SEQ ID NO: 17838 - DNA, 25 bp, Homo sapiens
tgtccatataaatttccattgaagt

SEQ ID NO: 17839 - DNA, 25 bp, Homo sapiens
ttgtaccccaaataacatcgtctgt

SEQ ID NO: 17840 - DNA, 25 bp, Homo sapiens
tttaggctttatcagtgtaatctct

SEQ ID NO: 17841 - DNA, 25 bp, Homo sapiens
tttgtgcaggattctttaggcttta

SEQ ID NO: 17842 - DNA, 25 bp, Homo sapiens
agctgtggagttcagtccaggcatg

SEQ ID NO: 17843 - DNA, 25 bp, Homo sapiens
agtacccattcttcgagttcaaagc

SEQ ID NO: 17844 - DNA, 25 bp, Homo sapiens
ctctaccatcctgcactgtgagcag

SEQ ID NO: 17845 - DNA, 25 bp, Homo sapiens
gaacttctctcagcagagagtaccc

SEQ ID NO: 17846 - DNA, 25 bp, Homo sapiens
gaagactaaatctgctttaccaagt

SEQ ID NO: 17847 - DNA, 25 bp, Homo sapiens
gagcagcactatacctgtgcgttgt

SEQ ID NO: 17848 - DNA, 25 bp, Homo sapiens
gctacgtgatagacaatttcagcta

SEQ ID NO: 17849 - DNA, 25 bp, Homo sapiens
gtctggtagcctttgcatttaacaa

SEQ ID NO: 17850 - DNA, 25 bp, Homo sapiens
taaatggtcgtctggtagcctttgc

SEQ ID NO: 17851 - DNA, 25 bp, Homo sapiens
tcataaagactttcaatcatttcat

SEQ ID NO: 17852 - DNA, 25 bp, Homo sapiens
tgtaaggttgcatgtttcagtcctc

SEQ ID NO: 17853 - DNA, 25 bp, Homo sapiens
acaactgtagtcagctcacaatttt

SEQ ID NO: 17854 - DNA, 25 bp, Homo sapiens
acttcagtgcaatcctacacagtat

SEQ ID NO: 17855 - DNA, 25 bp, Homo sapiens
atcttccattctatttttatctgct

SEQ ID NO: 17856 - DNA, 25 bp, Homo sapiens
cctttgtgtgcgtgtatgttgtgtg

SEQ ID NO: 17857 - DNA, 25 bp, Homo sapiens
gacctaatacatttcctctgtgtgt

SEQ ID NO: 17858 - DNA, 25 bp, Homo sapiens
gatttagcgcattcaaagctttttt

SEQ ID NO: 17859 - DNA, 25 bp, Homo sapiens
gttaatgccttcttggaattgtgtt

SEQ ID NO: 17860 - DNA, 25 bp, Homo sapiens
gttctcttggtttattatgccatca

SEQ ID NO: 17861 - DNA, 25 bp, Homo sapiens
tagccacagtattgccacagtttat

SEQ ID NO: 17862 - DNA, 25 bp, Homo sapiens
tcttttccactgtttgtaaggtgca

SEQ ID NO: 17863 - DNA, 25 bp, Homo sapiens
tttttctatcacttttgtgttcaga

SEQ ID NO: 17864 - DNA, 25 bp, Homo sapiens
aaatgcaactccttgctggattcct

SEQ ID NO: 17865 - DNA, 25 bp, Homo sapiens
agaactctctaaatgcaactccttg

SEQ ID NO: 17866 - DNA, 25 bp, Homo sapiens
gattccaacccaatatagcaaatga

SEQ ID NO: 17867 - DNA, 25 bp, Homo sapiens
gcatgtactgtctattgtttgggga

SEQ ID NO: 17868 - DNA, 25 bp, Homo sapiens
gctcaaatattaatttcctccttgc

SEQ ID NO: 17869 - DNA, 25 bp, Homo sapiens
gtccaggttactttgactgaaacac

SEQ ID NO: 17870 - DNA, 25 bp, Homo sapiens
taatactacgtaactttgtccaggt

SEQ ID NO: 17871 - DNA, 25 bp, Homo sapiens
taatgccccaatgatcttgctggtt

SEQ ID NO: 17872 - DNA, 25 bp, Homo sapiens
ttactgttcctaaaatgtcattcaa

SEQ ID NO: 17873 - DNA, 25 bp, Homo sapiens
ttggaaacccttactagacctatgt

SEQ ID NO: 17874 - DNA, 25 bp, Homo sapiens
ttggggatgggaactagttttgcaa

SEQ ID NO: 17875 - DNA, 25 bp, Homo sapiens
aaaatttatactgccacatgattgt

SEQ ID NO: 17876 - DNA, 25 bp, Homo sapiens
aacctgcatatgttgtttactagca

SEQ ID NO: 17877 - DNA, 25 bp, Homo sapiens
aagagctctgttgaatgtcatgaat

SEQ ID NO: 17878 - DNA, 25 bp, Homo sapiens
aatcacctaccgattacccttgatt

SEQ ID NO: 17879 - DNA, 25 bp, Homo sapiens
actgcaagactcacatattggttgg

SEQ ID NO: 17880 - DNA, 25 bp, Homo sapiens
gaaaagctatttatgctggatttgg

SEQ ID NO: 17881 - DNA, 25 bp, Homo sapiens
gaaatatagcagaatgttaacccat

SEQ ID NO: 17882 - DNA, 25 bp, Homo sapiens
ggtagattaactagcaggcctattt

SEQ ID NO: 17883 - DNA, 25 bp, Homo sapiens
gtacttcagactatcttgattgtca

SEQ ID NO: 17884 - DNA, 25 bp, Homo sapiens
tacttttttgtacttcagactatct

SEQ ID NO: 17885 - DNA, 25 bp, Homo sapiens
tggttggaaatttccctcaaatcac

SEQ ID NO: 17886 - DNA, 25 bp, Homo sapiens
atcttatctgtttcaattccttgct

SEQ ID NO: 17887 - DNA, 25 bp, Homo sapiens
attccttgctcatatcccatataat

SEQ ID NO: 17888 - DNA, 25 bp, Homo sapiens
ctctgccgcctttcttaaggatcaa

SEQ ID NO: 17889 - DNA, 25 bp, Homo sapiens
ctcttgtatacttgtcctagcacat

SEQ ID NO: 17890 - DNA, 25 bp, Homo sapiens
gactttgatttgaagcacctcatcc

SEQ ID NO: 17891 - DNA, 25 bp, Homo sapiens
gatgcagtacttaactttccttggt

SEQ ID NO: 17892 - DNA, 25 bp, Homo sapiens
gattttgtctaaccatatgttgcca

SEQ ID NO: 17893 - DNA, 25 bp, Homo sapiens
ggcattcttactgaggattttgtct

SEQ ID NO: 17894 - DNA, 25 bp, Homo sapiens
tccttctttcaatgcgaacactatc

SEQ ID NO: 17895 - DNA, 25 bp, Homo sapiens
tgatttgggaatcttcccctttcca

SEQ ID NO: 17896 - DNA, 25 bp, Homo sapiens
tgtagatattgccttgtgtattcca

SEQ ID NO: 17897 - DNA, 25 bp, Homo sapiens
aactcagcatccagttggcttttta

SEQ ID NO: 17898 - DNA, 25 bp, Homo sapiens
agagctttgagtttttttgttggat

SEQ ID NO: 17899 - DNA, 25 bp, Homo sapiens
atttcttggaattggcctcctgtat

SEQ ID NO: 17900 - DNA, 25 bp, Homo sapiens
atttgtcggagcacggatctaccac

SEQ ID NO: 17901 - DNA, 25 bp, Homo sapiens
caccattgcatatttgacacccctt

SEQ ID NO: 17902 - DNA, 25 bp, Homo sapiens
ccatcctgcacttcagactatttgt

SEQ ID NO: 17903 - DNA, 25 bp, Homo sapiens
ccttccccagccaaatagagctttg

SEQ ID NO: 17904 - DNA, 25 bp, Homo sapiens
gcattgccaatatcctgtattcttg

SEQ ID NO: 17905 - DNA, 25 bp, Homo sapiens
gttactctttccatggcttacaggt

SEQ ID NO: 17906 - DNA, 25 bp, Homo sapiens
tcacacaacacctcacttttgaatc

SEQ ID NO: 17907 - DNA, 25 bp, Homo sapiens
tcctgtattccttgagtggtcccga

SEQ ID NO: 17908 - DNA, 25 bp, Homo sapiens
aaaagatgccccacagagattctga

SEQ ID NO: 17909 - DNA, 25 bp, Homo sapiens
aactccccagtgttgagaaacaaat

SEQ ID NO: 17910 - DNA, 25 bp, Homo sapiens
agaagctctggctatgggttgccta

SEQ ID NO: 17911 - DNA, 25 bp, Homo sapiens
agcatattgtgctcttgtgaatgtt

SEQ ID NO: 17912 - DNA, 25 bp, Homo sapiens
atgttataaacttcgctgactttga

SEQ ID NO: 17913 - DNA, 25 bp, Homo sapiens
attgttctgatttaattggcttgga

SEQ ID NO: 17914 - DNA, 25 bp, Homo sapiens
caactcttgctgacgttgctgggga

SEQ ID NO: 17915 - DNA, 25 bp, Homo sapiens
ctatgggttgcctaaattgatgttt

SEQ ID NO: 17916 - DNA, 25 bp, Homo sapiens
gtttttgcttcgtaagaggttctgt

SEQ ID NO: 17917 - DNA, 25 bp, Homo sapiens
tggcttggagtagaattcaggcatt

SEQ ID NO: 17918 - DNA, 25 bp, Homo sapiens
ttgagcagtgatttgcaactcttgc

SEQ ID NO: 17919 - DNA, 25 bp, Homo sapiens
aagatgtacggtctggccaaaccac

SEQ ID NO: 17920 - DNA, 25 bp, Homo sapiens
atcaagctacaacttttcctgccat

SEQ ID NO: 17921 - DNA, 25 bp, Homo sapiens
ccagcccctgagtcatgaacagcaa

SEQ ID NO: 17922 - DNA, 25 bp, Homo sapiens
gaatgccagagaactgtccttcttt

SEQ ID NO: 17923 - DNA, 25 bp, Homo sapiens
gacagcctagagttctggacgagcg

SEQ ID NO: 17924 - DNA, 25 bp, Homo sapiens
gacatttattcttttgatgcacttg

SEQ ID NO: 17925 - DNA, 25 bp, Homo sapiens
ggacgagcgtgtttggtagcaggga

SEQ ID NO: 17926 - DNA, 25 bp, Homo sapiens
gggagaatcaaagctttcatttcag

SEQ ID NO: 17927 - DNA, 25 bp, Homo sapiens
gggatgaaagctagggcctcttatt

SEQ ID NO: 17928 - DNA, 25 bp, Homo sapiens
gtaattgcactttaagacagcctag

SEQ ID NO: 17929 - DNA, 25 bp, Homo sapiens
ttgggactgtgatcaagacaccttt

SEQ ID NO: 17930 - DNA, 25 bp, Homo sapiens
aaaaaacaattccctgagctctcaa

SEQ ID NO: 17931 - DNA, 25 bp, Homo sapiens
acactacattgtaaccttctaagta

SEQ ID NO: 17932 - DNA, 25 bp, Homo sapiens
caaaatgtcctctatctgctattaa

SEQ ID NO: 17933 - DNA, 25 bp, Homo sapiens
ctgcagtctgcaaagtctagagctt

SEQ ID NO: 17934 - DNA, 25 bp, Homo sapiens
ctgctttatgctgctgcagtctgca

SEQ ID NO: 17935 - DNA, 25 bp, Homo sapiens
cttttatcaggccatgtcataccca

SEQ ID NO: 17936 - DNA, 25 bp, Homo sapiens
gatccatcttcatccattgcattgg

SEQ ID NO: 17937 - DNA, 25 bp, Homo sapiens
ggggcaagggtgtctatttgcagca

SEQ ID NO: 17938 - DNA, 25 bp, Homo sapiens
ggttctctttagctgggatctggcc

SEQ ID NO: 17939 - DNA, 25 bp, Homo sapiens
gtcatacccaagaaagcacctattt

SEQ ID NO: 17940 - DNA, 25 bp, Homo sapiens
taactttgggttctctttagctggg

SEQ ID NO: 17941 - DNA, 25 bp, Homo sapiens
acactaactcttagggtgttgtagt

SEQ ID NO: 17942 - DNA, 25 bp, Homo sapiens
agatgcgtagctgtcatgctttttc

SEQ ID NO: 17943 - DNA, 25 bp, Homo sapiens
caaagataggtcccagtttaacact

SEQ ID NO: 17944 - DNA, 25 bp, Homo sapiens
ctcagaaccctctttcttgttaacg

SEQ ID NO: 17945 - DNA, 25 bp, Homo sapiens
ctgtctgaagccttgctatgctgta

SEQ ID NO: 17946 - DNA, 25 bp, Homo sapiens
gctacggagtattcacttctgagga

SEQ ID NO: 17947 - DNA, 25 bp, Homo sapiens
gtatgccttgttatttcatttccat

SEQ ID NO: 17948 - DNA, 25 bp, Homo sapiens
gttggtgtgttttgctcttacatta

SEQ ID NO: 17949 - DNA, 25 bp, Homo sapiens
taacactgaattgcttgacttctgt

SEQ ID NO: 17950 - DNA, 25 bp, Homo sapiens
tagaaaatactcgcacttcctcaga

SEQ ID NO: 17951 - DNA, 25 bp, Homo sapiens
ttctgaggatgcttttccggaaaaa

SEQ ID NO: 17952 - DNA, 25 bp, Homo sapiens
aaagttacaaacgcagatatctaca

SEQ ID NO: 17953 - DNA, 25 bp, Homo sapiens
agcaactttgtgtctttggggtcac

SEQ ID NO: 17954 - DNA, 25 bp, Homo sapiens
atgatgtatatactcccacagctcg

SEQ ID NO: 17955 - DNA, 25 bp, Homo sapiens
cccacagctcgcatgaaggaacagc

SEQ ID NO: 17956 - DNA, 25 bp, Homo sapiens
gatggagcagcacttagtgcttcat

SEQ ID NO: 17957 - DNA, 25 bp, Homo sapiens
gatttctggagtgtctgttattcaa

SEQ ID NO: 17958 - DNA, 25 bp, Homo sapiens
ggaacagcctctattgatacttggt

SEQ ID NO: 17959 - DNA, 25 bp, Homo sapiens
ggagggtggatggctgtcagagctc

SEQ ID NO: 17960 - DNA, 25 bp, Homo sapiens
ggggtcacagaacattttggggcag

SEQ ID NO: 17961 - DNA, 25 bp, Homo sapiens
gtcagagctcttgcagatactgtgt

SEQ ID NO: 17962 - DNA, 25 bp, Homo sapiens
ttaattgtactgaccctggacccag

SEQ ID NO: 17963 - DNA, 25 bp, Homo sapiens
aagcctgactgccaacagaaaccct

SEQ ID NO: 17964 - DNA, 25 bp, Homo sapiens
agccaagcagacacggatgtcccct

SEQ ID NO: 17965 - DNA, 25 bp, Homo sapiens
cactgcccagcttgtgaggccagga

SEQ ID NO: 17966 - DNA, 25 bp, Homo sapiens
ccaacagaaaccctctcctagtgag

SEQ ID NO: 17967 - DNA, 25 bp, Homo sapiens
ctctcctagtgaggggcaggtgggt

SEQ ID NO: 17968 - DNA, 25 bp, Homo sapiens
cttctgacccctgctgtgaggaatg

SEQ ID NO: 17969 - DNA, 25 bp, Homo sapiens
gatgtcccctcttctgggaggaggg

SEQ ID NO: 17970 - DNA, 25 bp, Homo sapiens
gggaggagggtagtgctcccaggcc

SEQ ID NO: 17971 - DNA, 25 bp, Homo sapiens
tgcccagtaccggggatgccaggag

SEQ ID NO: 17972 - DNA, 25 bp, Homo sapiens
tggggggtgtttgcatcaccccctt

SEQ ID NO: 17973 - DNA, 25 bp, Homo sapiens
tggttctgacctggggggtgtttgc

SEQ ID NO: 17974 - DNA, 25 bp, Homo sapiens
aggggtttaatttatccaatgcttg

SEQ ID NO: 17975 - DNA, 25 bp, Homo sapiens
atgcttctagtgttttggccataca

SEQ ID NO: 17976 - DNA, 25 bp, Homo sapiens
catttccaggcgtgcctgtgtcctg

SEQ ID NO: 17977 - DNA, 25 bp, Homo sapiens
ccaatgcttgacgacatgttcagga

SEQ ID NO: 17978 - DNA, 25 bp, Homo sapiens
gcatctcactatttattgacaggtt

SEQ ID NO: 17979 - DNA, 25 bp, Homo sapiens
gtttacatcttctttatgttgtatc

SEQ ID NO: 17980 - DNA, 25 bp, Homo sapiens
tcatcccactatgaatctggcatct

SEQ ID NO: 17981 - DNA, 25 bp, Homo sapiens
tgaatctggcatcttcttatgcttc

SEQ ID NO: 17982 - DNA, 25 bp, Homo sapiens
tgcctgtgtcctgtagctttttaaa

SEQ ID NO: 17983 - DNA, 25 bp, Homo sapiens
tggccatacatcaaccaaggggttt

SEQ ID NO: 17984 - DNA, 25 bp, Homo sapiens
tgtgtatacatttccaggcgtgcct

SEQ ID NO: 17985 - DNA, 25 bp, Homo sapiens
accagtatgaccttgtctagtctcc

SEQ ID NO: 17986 - DNA, 25 bp, Homo sapiens
ataacctttgcaaaccttcaagctg

SEQ ID NO: 17987 - DNA, 25 bp, Homo sapiens
atactcaatgcgtctgatgtgtcat

SEQ ID NO: 17988 - DNA, 25 bp, Homo sapiens
ctaaacttttaaacatctccattat

SEQ ID NO: 17989 - DNA, 25 bp, Homo sapiens
gaaggtatttatcatagttgccaat

SEQ ID NO: 17990 - DNA, 25 bp, Homo sapiens
gaatcacctagtcttcactatattg

SEQ ID NO: 17991 - DNA, 25 bp, Homo sapiens
gaccttgtctagtctccaaacttaa

SEQ ID NO: 17992 - DNA, 25 bp, Homo sapiens
gatgagagcaaaggggtcgcaccat

SEQ ID NO: 17993 - DNA, 25 bp, Homo sapiens
ggggtcgcaccatatggaaatgttg

SEQ ID NO: 17994 - DNA, 25 bp, Homo sapiens
gtatctttgctagtcaacaacttat

SEQ ID NO: 17995 - DNA, 25 bp, Homo sapiens
tctccattatatctacatccttttg

SEQ ID NO: 17996 - DNA, 25 bp, Homo sapiens
aacctgttctcttgtatctgaatct

SEQ ID NO: 17997 - DNA, 25 bp, Homo sapiens
aggaaactacctcatgctctgaagg

SEQ ID NO: 17998 - DNA, 25 bp, Homo sapiens
ctccagccattgcaagtctcagata

SEQ ID NO: 17999 - DNA, 25 bp, Homo sapiens
gaaagatcatccgcaggctatgtta

SEQ ID NO: 18000 - DNA, 25 bp, Homo sapiens
gagccatctggtgtgaagaactcta

SEQ ID NO: 18001 - DNA, 25 bp, Homo sapiens
gtactgatagactccagccattgca

SEQ ID NO: 18002 - DNA, 25 bp, Homo sapiens
gtctcagatatcttagctgtgtagt

SEQ ID NO: 18003 - DNA, 25 bp, Homo sapiens
tggctttgttacaccagagccatct

SEQ ID NO: 18004 - DNA, 25 bp, Homo sapiens
tgtaaatgaggcttggcttttgtga

SEQ ID NO: 18005 - DNA, 25 bp, Homo sapiens
tttattatttgcagattcctcatca

SEQ ID NO: 18006 - DNA, 25 bp, Homo sapiens
ttttgctggcaatagacacattctt

SEQ ID NO: 18007 - DNA, 25 bp, Homo sapiens
aacgttagtttctcttactctgctt

SEQ ID NO: 18008 - DNA, 25 bp, Homo sapiens
acacacacatccaccggtggaagag

SEQ ID NO: 18009 - DNA, 25 bp, Homo sapiens
cggtgaaaacacctgtctgctttct

SEQ ID NO: 18010 - DNA, 25 bp, Homo sapiens
gaaactgtctattttgaatggctga

SEQ ID NO: 18011 - DNA, 25 bp, Homo sapiens
gaatttattcctgttattgcgatat

SEQ ID NO: 18012 - DNA, 25 bp, Homo sapiens
gggatggaatggatgcaccgcaaat

SEQ ID NO: 18013 - DNA, 25 bp, Homo sapiens
gtggaagagacgcccggtgaaaaca

SEQ ID NO: 18014 - DNA, 25 bp, Homo sapiens
taatgcattttctgagttttcttgt

SEQ ID NO: 18015 - DNA, 25 bp, Homo sapiens
tgcgatatactctggattctttaca

SEQ ID NO: 18016 - DNA, 25 bp, Homo sapiens
tgctttctaagccagtgaggttgag

SEQ ID NO: 18017 - DNA, 25 bp, Homo sapiens
tggatgtttggcgttgcacacacac

SEQ ID NO: 18018 - DNA, 25 bp, Homo sapiens
agaatgtagctaaagcccctgctgc

SEQ ID NO: 18019 - DNA, 25 bp, Homo sapiens
agcaggtgtggtttgagccaggacc

SEQ ID NO: 18020 - DNA, 25 bp, Homo sapiens
ccccttcctcgagtttgaatatcca

SEQ ID NO: 18021 - DNA, 25 bp, Homo sapiens
ctgcgtggggacaatccatcgtgga

SEQ ID NO: 18022 - DNA, 25 bp, Homo sapiens
gaatcttttgtacttcttgttggtt

SEQ ID NO: 18023 - DNA, 25 bp, Homo sapiens
gatgtgggtgattctgtacctgggg

SEQ ID NO: 18024 - DNA, 25 bp, Homo sapiens
gcacatgccacagcaggcggtgggg

SEQ ID NO: 18025 - DNA, 25 bp, Homo sapiens
gtgttctctcagcttaggtctggac

SEQ ID NO: 18026 - DNA, 25 bp, Homo sapiens
tccatcgtggagtgttctctcagct

SEQ ID NO: 18027 - DNA, 25 bp, Homo sapiens
tctgtacctggggaggctatctctg

SEQ ID NO: 18028 - DNA, 25 bp, Homo sapiens
tgcacacctcagcatgagccaagac

SEQ ID NO: 18029 - DNA, 25 bp, Homo sapiens
aactactctttcagtcaaggttcct

SEQ ID NO: 18030 - DNA, 25 bp, Homo sapiens
aagggaagttactacacattgagtt

SEQ ID NO: 18031 - DNA, 25 bp, Homo sapiens
atactgttatgtgtaatggcgtaaa

SEQ ID NO: 18032 - DNA, 25 bp, Homo sapiens
attttgatgtactaagacctatttt

SEQ ID NO: 18033 - DNA, 25 bp, Homo sapiens
caaggttccttaatcagtccagtct

SEQ ID NO: 18034 - DNA, 25 bp, Homo sapiens
cattgcagatcaaggttgctcttct

SEQ ID NO: 18035 - DNA, 25 bp, Homo sapiens
ccttaatcagtccagtctacatcag

SEQ ID NO: 18036 - DNA, 25 bp, Homo sapiens
gctactattgtcaactgctgttgta

SEQ ID NO: 18037 - DNA, 25 bp, Homo sapiens
gtccagtctacatcaggactatgac

SEQ ID NO: 18038 - DNA, 25 bp, Homo sapiens
tcaggactatgacttggggggcggg

SEQ ID NO: 18039 - DNA, 25 bp, Homo sapiens
tgaagaacacaccaaactaacattt

SEQ ID NO: 18040 - DNA, 25 bp, Homo sapiens
aagatgccaatgtttcatccaccgg

SEQ ID NO: 18041 - DNA, 25 bp, Homo sapiens
acaggtgtttactgtgctgctgcac

SEQ ID NO: 18042 - DNA, 25 bp, Homo sapiens
agacggacagcagctgtggcgacct

SEQ ID NO: 18043 - DNA, 25 bp, Homo sapiens
cccacccaggacggctgtgatgagg

SEQ ID NO: 18044 - DNA, 25 bp, Homo sapiens
cgtccctggcttgtacatatgtgat

SEQ ID NO: 18045 - DNA, 25 bp, Homo sapiens
ctcctgtactgtgcgtgcacttgag

SEQ ID NO: 18046 - DNA, 25 bp, Homo sapiens
gccctggtggggctgatgtcacagg

SEQ ID NO: 18047 - DNA, 25 bp, Homo sapiens
ggacggctgtgatgaggtggccctc

SEQ ID NO: 18048 - DNA, 25 bp, Homo sapiens
ggggctgatgtcacaggtgtttact

SEQ ID NO: 18049 - DNA, 25 bp, Homo sapiens
gtcttacacccgagtgttagcccta

SEQ ID NO: 18050 - DNA, 25 bp, Homo sapiens
tactgtgcgtgcacttgaggctctg

SEQ ID NO: 18051 - DNA, 25 bp, Homo sapiens
aagcctacaatatcatcagggggca

SEQ ID NO: 18052 - DNA, 25 bp, Homo sapiens
actaattgtattcctcacattcaca

SEQ ID NO: 18053 - DNA, 25 bp, Homo sapiens
cattcacaatccccattggtctgaa

SEQ ID NO: 18054 - DNA, 25 bp, Homo sapiens
cattggtctgaagtcacgtagcaca

SEQ ID NO: 18055 - DNA, 25 bp, Homo sapiens
ctaagctttcttacaatgtggactg

SEQ ID NO: 18056 - DNA, 25 bp, Homo sapiens
gcacattaatttgcagtggctgctt

SEQ ID NO: 18057 - DNA, 25 bp, Homo sapiens
gcacattttgggtagttgaggtctt

SEQ ID NO: 18058 - DNA, 25 bp, Homo sapiens
gggctttatgcaggattctctttga

SEQ ID NO: 18059 - DNA, 25 bp, Homo sapiens
gtagcacagagcatctatagcacat

SEQ ID NO: 18060 - DNA, 25 bp, Homo sapiens
gttttcgcctttagctttctaagct

SEQ ID NO: 18061 - DNA, 25 bp, Homo sapiens
tgaggtcttttgttttcgcctttag

SEQ ID NO: 18062 - DNA, 25 bp, Homo sapiens
aaacagctgtacctctaagctcctt

SEQ ID NO: 18063 - DNA, 25 bp, Homo sapiens
attcctgtaattattgtgcccttta

SEQ ID NO: 18064 - DNA, 25 bp, Homo sapiens
gagatgccttttattccaacgtgtt

SEQ ID NO: 18065 - DNA, 25 bp, Homo sapiens
gcaaaactcgcctgtttttgtcctc

SEQ ID NO: 18066 - DNA, 25 bp, Homo sapiens
gcacaactcgggagctgtgcacggc

SEQ ID NO: 18067 - DNA, 25 bp, Homo sapiens
gcacccatgagctttccaatagtat

SEQ ID NO: 18068 - DNA, 25 bp, Homo sapiens
tcaccctgtattctcaatgatccct

SEQ ID NO: 18069 - DNA, 25 bp, Homo sapiens
tccctgtcactcattattctgtact

SEQ ID NO: 18070 - DNA, 25 bp, Homo sapiens
tgcacggcttctcaagtgattcagt

SEQ ID NO: 18071 - DNA, 25 bp, Homo sapiens
ttccaacgtgtttgatccctgtcac

SEQ ID NO: 18072 - DNA, 25 bp, Homo sapiens
ttttgtcctcaatggcacccatgag

SEQ ID NO: 18073 - DNA, 25 bp, Homo sapiens
cccttcctctgctaagtgtttatag

SEQ ID NO: 18074 - DNA, 25 bp, Homo sapiens
ctgcagtgagtcctgatcatgctgc

SEQ ID NO: 18075 - DNA, 25 bp, Homo sapiens
ctgctttcagaaggaggtggattca

SEQ ID NO: 18076 - DNA, 25 bp, Homo sapiens
gaagtgcatcaaacttgggaaagat

SEQ ID NO: 18077 - DNA, 25 bp, Homo sapiens
gactgcatctctacagagagtaaaa

SEQ ID NO: 18078 - DNA, 25 bp, Homo sapiens
gagacatttagaagtgattcctgct

SEQ ID NO: 18079 - DNA, 25 bp, Homo sapiens
gcatgcacagcatagcaagactgca

SEQ ID NO: 18080 - DNA, 25 bp, Homo sapiens
ggaggtggattcaaatacatcaaaa

SEQ ID NO: 18081 - DNA, 25 bp, Homo sapiens
tgcactcaatcttggacaacagagc

SEQ ID NO: 18082 - DNA, 25 bp, Homo sapiens
tgctgctgcactcaatcttggacaa

SEQ ID NO: 18083 - DNA, 25 bp, Homo sapiens
tgggaaagatttgaggaggctggga

SEQ ID NO: 18084 - DNA, 25 bp, Homo sapiens
aaaactcctgttgagactgtgtctt

SEQ ID NO: 18085 - DNA, 25 bp, Homo sapiens
aatctttctgtagttatctgcataa

SEQ ID NO: 18086 - DNA, 25 bp, Homo sapiens
aattatcctcagtgtagcttcttgg

SEQ ID NO: 18087 - DNA, 25 bp, Homo sapiens
ctggctcctgggttgacaatttgtg

SEQ ID NO: 18088 - DNA, 25 bp, Homo sapiens
gaaacaactctattgctactattta

SEQ ID NO: 18089 - DNA, 25 bp, Homo sapiens
gaacctctgaaacgtacaagccttc

SEQ ID NO: 18090 - DNA, 25 bp, Homo sapiens
gactgtgtcttatgaacctctgaaa

SEQ ID NO: 18091 - DNA, 25 bp, Homo sapiens
gatctcggtagttacgtattgggca

SEQ ID NO: 18092 - DNA, 25 bp, Homo sapiens
gcacggcatgggcccatatgtgtga

SEQ ID NO: 18093 - DNA, 25 bp, Homo sapiens
gtttatttgtttgatgggtcccagg

SEQ ID NO: 18094 - DNA, 25 bp, Homo sapiens
tgcctgctatgtgcacggcatgggc

SEQ ID NO: 18095 - DNA, 25 bp, Homo sapiens
aaagccagtttcttggcatttcaaa

SEQ ID NO: 18096 - DNA, 25 bp, Homo sapiens
aacttactcctctttcaagtaacag

SEQ ID NO: 18097 - DNA, 25 bp, Homo sapiens
atagcatctatgtctctttcaaggg

SEQ ID NO: 18098 - DNA, 25 bp, Homo sapiens
cattctttactgtgtcctactactg

SEQ ID NO: 18099 - DNA, 25 bp, Homo sapiens
gacagcaagtattatggccaaagcc

SEQ ID NO: 18100 - DNA, 25 bp, Homo sapiens
ggattcatcccctgatcttaaatca

SEQ ID NO: 18101 - DNA, 25 bp, Homo sapiens
taataactaacttacctttgcatgt

SEQ ID NO: 18102 - DNA, 25 bp, Homo sapiens
tattgtatctacacactccacattc

SEQ ID NO: 18103 - DNA, 25 bp, Homo sapiens
tcttggctccctgctgtattaaaca

SEQ ID NO: 18104 - DNA, 25 bp, Homo sapiens
tggttttcatcctggattcatcccc

SEQ ID NO: 18105 - DNA, 25 bp, Homo sapiens
tgtgtcctactactgtatcttggct

SEQ ID NO: 18106 - DNA, 25 bp, Homo sapiens
aaaaactattcatacctggcttcca

SEQ ID NO: 18107 - DNA, 25 bp, Homo sapiens
atgaataattctctttgatgccatt

SEQ ID NO: 18108 - DNA, 25 bp, Homo sapiens
ctggcttccaggtaattgactttga

SEQ ID NO: 18109 - DNA, 25 bp, Homo sapiens
ctgtcaagttcataaccagcttcat

SEQ ID NO: 18110 - DNA, 25 bp, Homo sapiens
ctgtttctactctctgtatctgatt

SEQ ID NO: 18111 - DNA, 25 bp, Homo sapiens
gaaacatcgttgagtagcctacctt

SEQ ID NO: 18112 - DNA, 25 bp, Homo sapiens
gacttcaatatctgttgcctgtcat

SEQ ID NO: 18113 - DNA, 25 bp, Homo sapiens
gcacccctagatagtgtgattctgt

SEQ ID NO: 18114 - DNA, 25 bp, Homo sapiens
gtcaactgcatgcagctttgctgat

SEQ ID NO: 18115 - DNA, 25 bp, Homo sapiens
ttatcctgcgacaacactttcagca

SEQ ID NO: 18116 - DNA, 25 bp, Homo sapiens
ttatctcacagatcacaagcacccc

SEQ ID NO: 18117 - DNA, 25 bp, Homo sapiens
aaactggactagccttatttgcaag

SEQ ID NO: 18118 - DNA, 25 bp, Homo sapiens
aagtcaactggtgtttcttgttcat

SEQ ID NO: 18119 - DNA, 25 bp, Homo sapiens
aatcttcgtcattgtcttaaagtca

SEQ ID NO: 18120 - DNA, 25 bp, Homo sapiens
aatggccaacatttggtcagccctt

SEQ ID NO: 18121 - DNA, 25 bp, Homo sapiens
actttggtacgatggtgctttgcaa

SEQ ID NO: 18122 - DNA, 25 bp, Homo sapiens
gaaggatctggtgctgctttcagat

SEQ ID NO: 18123 - DNA, 25 bp, Homo sapiens
ggtgctgctttcagatgtttatctt

SEQ ID NO: 18124 - DNA, 25 bp, Homo sapiens
gtttcttgttcattgactttggtac

SEQ ID NO: 18125 - DNA, 25 bp, Homo sapiens
tacagacaacgcgcttttgctgaac

SEQ ID NO: 18126 - DNA, 25 bp, Homo sapiens
ttcccttaagctttaatcttcgtca

SEQ ID NO: 18127 - DNA, 25 bp, Homo sapiens
tttgctgaactgtccattttggtgg

SEQ ID NO: 18128 - DNA, 25 bp, Homo sapiens
cagctgtgtcagcttggagaccctt

SEQ ID NO: 18129 - DNA, 25 bp, Homo sapiens
ctatttcccacactatgaggttccc

SEQ ID NO: 18130 - DNA, 25 bp, Homo sapiens
gagggctatatgccagacctggact

SEQ ID NO: 18131 - DNA, 25 bp, Homo sapiens
gatgacctccagggtgtgggcgagg

SEQ ID NO: 18132 - DNA, 25 bp, Homo sapiens
gctgtatctcagcaggggtggtgtg

SEQ ID NO: 18133 - DNA, 25 bp, Homo sapiens
ggagacccttgggagtcacagcgaa

SEQ ID NO: 18134 - DNA, 25 bp, Homo sapiens
gggcgaggaattatcttccagcccc

SEQ ID NO: 18135 - DNA, 25 bp, Homo sapiens
ggtgtgggtaccacaccagcctcag

SEQ ID NO: 18136 - DNA, 25 bp, Homo sapiens
gtccacccgtcctcattatgaggaa

SEQ ID NO: 18137 - DNA, 25 bp, Homo sapiens
tccagttcctcggtgccaggagaga

SEQ ID NO: 18138 - DNA, 25 bp, Homo sapiens
tgaccccatggacagccatcagtcc

SEQ ID NO: 18139 - DNA, 25 bp, Homo sapiens
gaatgtaccatttcaactttgattt

SEQ ID NO: 18140 - DNA, 25 bp, Homo sapiens
gcaagtgtgcatggttcaatccctc

SEQ ID NO: 18141 - DNA, 25 bp, Homo sapiens
gcaattgggccagatgctaatttgc

SEQ ID NO: 18142 - DNA, 25 bp, Homo sapiens
gcagtagacgtagacctctgtcctt

SEQ ID NO: 18143 - DNA, 25 bp, Homo sapiens
ggatacctgagcactaacagcagta

SEQ ID NO: 18144 - DNA, 25 bp, Homo sapiens
ggatggcctaggacataggtctcaa

SEQ ID NO: 18145 - DNA, 25 bp, Homo sapiens
gttcaatccctcacatccaggaaat

SEQ ID NO: 18146 - DNA, 25 bp, Homo sapiens
tctgtcctttaccatctgaggtctt

SEQ ID NO: 18147 - DNA, 25 bp, Homo sapiens
tgaggtcttctggattctttgtggg

SEQ ID NO: 18148 - DNA, 25 bp, Homo sapiens
tgccacagccatggtttccatttct

SEQ ID NO: 18149 - DNA, 25 bp, Homo sapiens
ttgcacgttgattcaccttctttgc

SEQ ID NO: 18150 - DNA, 25 bp, Homo sapiens
aaccttgagtattgcagttgctgct

SEQ ID NO: 18151 - DNA, 25 bp, Homo sapiens
aagatttaagctctggtggatgatt

SEQ ID NO: 18152 - DNA, 25 bp, Homo sapiens
aatgcattactttcacttaacacta

SEQ ID NO: 18153 - DNA, 25 bp, Homo sapiens
atactgtaatatacctgtcacacaa

SEQ ID NO: 18154 - DNA, 25 bp, Homo sapiens
atgccatggcatttgacagttcatt

SEQ ID NO: 18155 - DNA, 25 bp, Homo sapiens
gatgattatctgctaagtaagtctg

SEQ ID NO: 18156 - DNA, 25 bp, Homo sapiens
gcagttgctgctttgtacagaggtt

SEQ ID NO: 18157 - DNA, 25 bp, Homo sapiens
tagagatgctagctagtgttgaagc

SEQ ID NO: 18158 - DNA, 25 bp, Homo sapiens
tcacttaacactagacaccaggtcg

SEQ ID NO: 18159 - DNA, 25 bp, Homo sapiens
ttatttgttacattattccatttgt

SEQ ID NO: 18160 - DNA, 25 bp, Homo sapiens
tttacattctttttatatgcattct

SEQ ID NO: 18161 - DNA, 25 bp, Homo sapiens
actggcaatggccctttaactgcaa

SEQ ID NO: 18162 - DNA, 25 bp, Homo sapiens
agttactcatattgtcctttgcttg

SEQ ID NO: 18163 - DNA, 25 bp, Homo sapiens
cctttgcttgaatgcaatgccgtgc

SEQ ID NO: 18164 - DNA, 25 bp, Homo sapiens
gacactagctagtactgctgcctca

SEQ ID NO: 18165 - DNA, 25 bp, Homo sapiens
gatgccttaagatgcccaaagctgc

SEQ ID NO: 18166 - DNA, 25 bp, Homo sapiens
gctgcctcatgtaactccaaagaaa

SEQ ID NO: 18167 - DNA, 25 bp, Homo sapiens
taatgcttactacaatactactgag

SEQ ID NO: 18168 - DNA, 25 bp, Homo sapiens
taggactatagtcagcatgctagac

SEQ ID NO: 18169 - DNA, 25 bp, Homo sapiens
tggtgataactggcacttaagatcg

SEQ ID NO: 18170 - DNA, 25 bp, Homo sapiens
ttctgtgcattactttaacacctta

SEQ ID NO: 18171 - DNA, 25 bp, Homo sapiens
tttccttcttcagctgactggcaat

SEQ ID NO: 18172 - DNA, 25 bp, Homo sapiens
aatcattttcagtttgactcataca

SEQ ID NO: 18173 - DNA, 25 bp, Homo sapiens
aatttagttgagctttctaagagaa

SEQ ID NO: 18174 - DNA, 25 bp, Homo sapiens
agagttatagaatgacagggctgga

SEQ ID NO: 18175 - DNA, 25 bp, Homo sapiens
agattattcttctcaaatttagttg

SEQ ID NO: 18176 - DNA, 25 bp, Homo sapiens
agtgaccttagagagtatccagttc

SEQ ID NO: 18177 - DNA, 25 bp, Homo sapiens
gaatgacagggctggaagtgacctt

SEQ ID NO: 18178 - DNA, 25 bp, Homo sapiens
gactcatacagttaacacaatgtga

SEQ ID NO: 18179 - DNA, 25 bp, Homo sapiens
taagagaagcaattggctttttccc

SEQ ID NO: 18180 - DNA, 25 bp, Homo sapiens
tcttcctcagcataacagagttata

SEQ ID NO: 18181 - DNA, 25 bp, Homo sapiens
tgaatttcttcctcagcataacaga

SEQ ID NO: 18182 - DNA, 25 bp, Homo sapiens
ttagagagtatccagttctttcatt

SEQ ID NO: 18183 - DNA, 25 bp, Homo sapiens
aaagtactgtataacatcttgttta

SEQ ID NO: 18184 - DNA, 25 bp, Homo sapiens
acctcatcagtatgattcagtttct

SEQ ID NO: 18185 - DNA, 25 bp, Homo sapiens
agattttcatcgggtgcattctctc

SEQ ID NO: 18186 - DNA, 25 bp, Homo sapiens
atggttcatttcctttatggtcata

SEQ ID NO: 18187 - DNA, 25 bp, Homo sapiens
ctcttatcaattggactctcccagg

SEQ ID NO: 18188 - DNA, 25 bp, Homo sapiens
gatacattgcactaaactgatggaa

SEQ ID NO: 18189 - DNA, 25 bp, Homo sapiens
ggctgctgagaaagagtgccctgcc

SEQ ID NO: 18190 - DNA, 25 bp, Homo sapiens
gtgacaagttatcttggctgctgag

SEQ ID NO: 18191 - DNA, 25 bp, Homo sapiens
tctctctgcttcgtgtgtgacaagt

SEQ ID NO: 18192 - DNA, 25 bp, Homo sapiens
ttctgtcatttaacctggtaaaggc

SEQ ID NO: 18193 - DNA, 25 bp, Homo sapiens
tttacttttcgatgccaatgataca

SEQ ID NO: 18194 - DNA, 25 bp, Homo sapiens
aaacgagagtacttggactgcaacc

SEQ ID NO: 18195 - DNA, 25 bp, Homo sapiens
agataagaccacagtccttagccca

SEQ ID NO: 18196 - DNA, 25 bp, Homo sapiens
atcccaccaccgcaaggtaaagtga

SEQ ID NO: 18197 - DNA, 25 bp, Homo sapiens
attctcatggaggctactatagggt

SEQ ID NO: 18198 - DNA, 25 bp, Homo sapiens
catctccaggctcagactaaacgag

SEQ ID NO: 18199 - DNA, 25 bp, Homo sapiens
catttttcctgtcctaatctcagag

SEQ ID NO: 18200 - DNA, 25 bp, Homo sapiens
gatgaaagacatcaggatcccacca

SEQ ID NO: 18201 - DNA, 25 bp, Homo sapiens
gcacaggagtaccaattttcctttc

SEQ ID NO: 18202 - DNA, 25 bp, Homo sapiens
gtgatggtaccgtataatcctgtaa

SEQ ID NO: 18203 - DNA, 25 bp, Homo sapiens
ttagcccaatcccagctatacagtc

SEQ ID NO: 18204 - DNA, 25 bp, Homo sapiens
ttctggaacccctgtggcacaggag

SEQ ID NO: 18205 - DNA, 25 bp, Homo sapiens
aattccacatacaacataactgtaa

SEQ ID NO: 18206 - DNA, 25 bp, Homo sapiens
actccatggatctgtgttctgactg

SEQ ID NO: 18207 - DNA, 25 bp, Homo sapiens
agcctggggctagatgtggaactcc

SEQ ID NO: 18208 - DNA, 25 bp, Homo sapiens
ataatttcagcttccttgatttaga

SEQ ID NO: 18209 - DNA, 25 bp, Homo sapiens
attaatgcttggtagcctggggcta

SEQ ID NO: 18210 - DNA, 25 bp, Homo sapiens
atttgtggttcatgtatattttgac

SEQ ID NO: 18211 - DNA, 25 bp, Homo sapiens
ctgctctttttgatgttgtagtgac

SEQ ID NO: 18212 - DNA, 25 bp, Homo sapiens
gtgtgtgctgtccaaattttttccc

SEQ ID NO: 18213 - DNA, 25 bp, Homo sapiens
ttatacaaaatcctctgcctagcac

SEQ ID NO: 18214 - DNA, 25 bp, Homo sapiens
ttatttccattgtgagttctgacaa

SEQ ID NO: 18215 - DNA, 25 bp, Homo sapiens
ttctgactggcacctttggaatgaa

SEQ ID NO: 18216 - DNA, 25 bp, Homo sapiens
aaactaaacttctttactgctgata

SEQ ID NO: 18217 - DNA, 25 bp, Homo sapiens
aatagctgcatttccagacctgacc

SEQ ID NO: 18218 - DNA, 25 bp, Homo sapiens
actgctgatatgtttcctgtattct

SEQ ID NO: 18219 - DNA, 25 bp, Homo sapiens
atgaactctacttttatagcctagt

SEQ ID NO: 18220 - DNA, 25 bp, Homo sapiens
cattatttttgtacactttccccat

SEQ ID NO: 18221 - DNA, 25 bp, Homo sapiens
gaagcctgaagctaaagagcactct

SEQ ID NO: 18222 - DNA, 25 bp, Homo sapiens
gaccaaagaaagcccaagttctcct

SEQ ID NO: 18223 - DNA, 25 bp, Homo sapiens
gctcatagtccgtcaccgaaaatag

SEQ ID NO: 18224 - DNA, 25 bp, Homo sapiens
gctgactcctccagtttacttaagg

SEQ ID NO: 18225 - DNA, 25 bp, Homo sapiens
gtgctttgggcgaactgtattcctt

SEQ ID NO: 18226 - DNA, 25 bp, Homo sapiens
tttgtacactttccccatgttaagg

SEQ ID NO: 18227 - DNA, 25 bp, Homo sapiens
aataggttggaaagctgtgtactct

SEQ ID NO: 18228 - DNA, 25 bp, Homo sapiens
acacaatttcccactcaattctgaa

SEQ ID NO: 18229 - DNA, 25 bp, Homo sapiens
acagttcaaccagtgaccgacttct

SEQ ID NO: 18230 - DNA, 25 bp, Homo sapiens
actactcagcatttcttgttgccta

SEQ ID NO: 18231 - DNA, 25 bp, Homo sapiens
atattgttctttcatgctagtggag

SEQ ID NO: 18232 - DNA, 25 bp, Homo sapiens
cctgtgatacaggtcactcatctgg

SEQ ID NO: 18233 - DNA, 25 bp, Homo sapiens
ggagagtggtgtcattagcatctta

SEQ ID NO: 18234 - DNA, 25 bp, Homo sapiens
ggtgatgtgttgtcatatcctgtga

SEQ ID NO: 18235 - DNA, 25 bp, Homo sapiens
gtattcttgtactgttcatttcaat

SEQ ID NO: 18236 - DNA, 25 bp, Homo sapiens
gtgtactctattcatatattgttct

SEQ ID NO: 18237 - DNA, 25 bp, Homo sapiens
gtttctgaagtttaagtctggtttg

SEQ ID NO: 18238 - DNA, 25 bp, Homo sapiens
agacctccaatatttgctacttgcc

SEQ ID NO: 18239 - DNA, 25 bp, Homo sapiens
agccccgtcatctaaatggcagaat

SEQ ID NO: 18240 - DNA, 25 bp, Homo sapiens
atgtggtgacttgcctatatcatga

SEQ ID NO: 18241 - DNA, 25 bp, Homo sapiens
gatgaacgtgttaggagacctccaa

SEQ ID NO: 18242 - DNA, 25 bp, Homo sapiens
gctacttgccaatcctaatttagtt

SEQ ID NO: 18243 - DNA, 25 bp, Homo sapiens
taggcaatcctacttaattttggca

SEQ ID NO: 18244 - DNA, 25 bp, Homo sapiens
tatccttcagggttatgtgcttatc

SEQ ID NO: 18245 - DNA, 25 bp, Homo sapiens
tgttttgttcatgatactatccttc

SEQ ID NO: 18246 - DNA, 25 bp, Homo sapiens
ttgaagatgctgggcgtctaccacc

SEQ ID NO: 18247 - DNA, 25 bp, Homo sapiens
ttgctttatcttatgctgctgattt

SEQ ID NO: 18248 - DNA, 25 bp, Homo sapiens
ttggcaaaagccccgtcatctaaat

SEQ ID NO: 18249 - DNA, 25 bp, Homo sapiens
aagcatacaagcaacctggtcatac

SEQ ID NO: 18250 - DNA, 25 bp, Homo sapiens
aatgccaaaattgtccatctgcctc

SEQ ID NO: 18251 - DNA, 25 bp, Homo sapiens
aatggaaataccaaaccttctgact

SEQ ID NO: 18252 - DNA, 25 bp, Homo sapiens
acaagaaaatgatccacaccactcc

SEQ ID NO: 18253 - DNA, 25 bp, Homo sapiens
atagcactgtatattatggatcgat

SEQ ID NO: 18254 - DNA, 25 bp, Homo sapiens
atagtcacctgctgttggatgcagc

SEQ ID NO: 18255 - DNA, 25 bp, Homo sapiens
atcgacttgttcttgatagcctcat

SEQ ID NO: 18256 - DNA, 25 bp, Homo sapiens
caaatgactgtctcttgcggatgct

SEQ ID NO: 18257 - DNA, 25 bp, Homo sapiens
caataatttctgtatggtccatagc

SEQ ID NO: 18258 - DNA, 25 bp, Homo sapiens
ctcggggttgggcctctatatggag

SEQ ID NO: 18259 - DNA, 25 bp, Homo sapiens
tgcggatgcttggtactgtaatgtt

SEQ ID NO: 18260 - DNA, 25 bp, Homo sapiens
acatcagctctgatcggatccagct

SEQ ID NO: 18261 - DNA, 25 bp, Homo sapiens
atcgaagccagctcggaagctcagt

SEQ ID NO: 18262 - DNA, 25 bp, Homo sapiens
catcctgctgccgaaccagaatggc

SEQ ID NO: 18263 - DNA, 25 bp, Homo sapiens
ccaaggatgcccttgtgcttactcc

SEQ ID NO: 18264 - DNA, 25 bp, Homo sapiens
gaagatcctaactcaggacactccc

SEQ ID NO: 18265 - DNA, 25 bp, Homo sapiens
gattcgaggcagctgagtcctcact

SEQ ID NO: 18266 - DNA, 25 bp, Homo sapiens
ggtgtgagctctatagaccatccct

SEQ ID NO: 18267 - DNA, 25 bp, Homo sapiens
tctggggtcccagtgtcattggtga

SEQ ID NO: 18268 - DNA, 25 bp, Homo sapiens
tggcccaactgatcgtgctggaagt

SEQ ID NO: 18269 - DNA, 25 bp, Homo sapiens
tgggattggctggttccaacctgat

SEQ ID NO: 18270 - DNA, 25 bp, Homo sapiens
ttgttcaccctgggcatcgaagcca

SEQ ID NO: 18271 - DNA, 25 bp, Homo sapiens
actgcaagtcggcctggattttcac

SEQ ID NO: 18272 - DNA, 25 bp, Homo sapiens
gaggctacagctgcattgtcaggtc

SEQ ID NO: 18273 - DNA, 25 bp, Homo sapiens
gcagctagcttgggctggattctca

SEQ ID NO: 18274 - DNA, 25 bp, Homo sapiens
gcatgttttcatctgagcgtgtcct

SEQ ID NO: 18275 - DNA, 25 bp, Homo sapiens
ggattttcacttgcagaggctacag

SEQ ID NO: 18276 - DNA, 25 bp, Homo sapiens
ggcatcacactggctagtgaggccg

SEQ ID NO: 18277 - DNA, 25 bp, Homo sapiens
ggtgattgcacttggacatcagtcc

SEQ ID NO: 18278 - DNA, 25 bp, Homo sapiens
gtctgggctcactccataaggtaag

SEQ ID NO: 18279 - DNA, 25 bp, Homo sapiens
gtgaggccgtgaatatcttgtcccc

SEQ ID NO: 18280 - DNA, 25 bp, Homo sapiens
tggattgttctacccaagcttttcc

SEQ ID NO: 18281 - DNA, 25 bp, Homo sapiens
ttaccttatggtccttctttagcag

SEQ ID NO: 18282 - DNA, 25 bp, Homo sapiens
aatggcttctatgatcagaactggg

SEQ ID NO: 18283 - DNA, 25 bp, Homo sapiens
atggtaggctacttttcagggcctt

SEQ ID NO: 18284 - DNA, 25 bp, Homo sapiens
cagggccttgacaagtacatcaccc

SEQ ID NO: 18285 - DNA, 25 bp, Homo sapiens
ccaggaataatgatacctcccaccc

SEQ ID NO: 18286 - DNA, 25 bp, Homo sapiens
ccccttgattcccataacataaaag

SEQ ID NO: 18287 - DNA, 25 bp, Homo sapiens
ctttcaagatcttcaaccatgaggt

SEQ ID NO: 18288 - DNA, 25 bp, Homo sapiens
gaaccctagcacaaatttgctttgg

SEQ ID NO: 18289 - DNA, 25 bp, Homo sapiens
gagccaagttcaaagaaccctagca

SEQ ID NO: 18290 - DNA, 25 bp, Homo sapiens
gggggagaatggcatggtaggctac

SEQ ID NO: 18291 - DNA, 25 bp, Homo sapiens
gtacatcacccagtggtatcctaca

SEQ ID NO: 18292 - DNA, 25 bp, Homo sapiens
gtatcctacatacttctttcaagat

SEQ ID NO: 18293 - DNA, 25 bp, Homo sapiens
acctagtgcaagcctggtactcagt

SEQ ID NO: 18294 - DNA, 25 bp, Homo sapiens
actctgctttgcccaagtgtgacag

SEQ ID NO: 18295 - DNA, 25 bp, Homo sapiens
agactcttccctaggactgacgagt

SEQ ID NO: 18296 - DNA, 25 bp, Homo sapiens
ataagagcattggtccccaagccag

SEQ ID NO: 18297 - DNA, 25 bp, Homo sapiens
catctgcatcttccattggtggtca

SEQ ID NO: 18298 - DNA, 25 bp, Homo sapiens
cttccggtctacaagagctctcaag

SEQ ID NO: 18299 - DNA, 25 bp, Homo sapiens
gaatggggctgcaaggccaaggctc

SEQ ID NO: 18300 - DNA, 25 bp, Homo sapiens
gactgacgagttacggctgccagat

SEQ ID NO: 18301 - DNA, 25 bp, Homo sapiens
gctccactcattgtcttgtgacttc

SEQ ID NO: 18302 - DNA, 25 bp, Homo sapiens
tccttacctctgatccacttagagc

SEQ ID NO: 18303 - DNA, 25 bp, Homo sapiens
tccttccttagagcctgagtggtgt

SEQ ID NO: 18304 - DNA, 25 bp, Homo sapiens
aaactattttacattagctacttca

SEQ ID NO: 18305 - DNA, 25 bp, Homo sapiens
aactctgattgactactaacttctg

SEQ ID NO: 18306 - DNA, 25 bp, Homo sapiens
aatgcatcattctgtttagtagtag

SEQ ID NO: 18307 - DNA, 25 bp, Homo sapiens
acattagctacttcattatggtttc

SEQ ID NO: 18308 - DNA, 25 bp, Homo sapiens
atgatactttcacataatatactat

SEQ ID NO: 18309 - DNA, 25 bp, Homo sapiens
attatcactgaacatatttcttatt

SEQ ID NO: 18310 - DNA, 25 bp, Homo sapiens
gaacctgttcatataactctgattg

SEQ ID NO: 18311 - DNA, 25 bp, Homo sapiens
gactactaacttctgttttatgtat

SEQ ID NO: 18312 - DNA, 25 bp, Homo sapiens
gagctgacactgtagtttgtggtga

SEQ ID NO: 18313 - DNA, 25 bp, Homo sapiens
tggctttgaattatacgtaacttaa

SEQ ID NO: 18314 - DNA, 25 bp, Homo sapiens
tttgtttcacctaacgaatactgcg

SEQ ID NO: 18315 - DNA, 25 bp, Homo sapiens
aattacttagtgctgagaccttggg

SEQ ID NO: 18316 - DNA, 25 bp, Homo sapiens
acaggtaagcaccagatgccatttg

SEQ ID NO: 18317 - DNA, 25 bp, Homo sapiens
ccacggggaggaccgaagagagaag

SEQ ID NO: 18318 - DNA, 25 bp, Homo sapiens
ctggcaggtcaggtgggatgtctca

SEQ ID NO: 18319 - DNA, 25 bp, Homo sapiens
gaagtggaaagggaggagcgtgcag

SEQ ID NO: 18320 - DNA, 25 bp, Homo sapiens
gaggcaccactagattttcgtatac

SEQ ID NO: 18321 - DNA, 25 bp, Homo sapiens
gcaccagatgccatttgaaaggctt

SEQ ID NO: 18322 - DNA, 25 bp, Homo sapiens
gggaaaatacaactggaggcaccac

SEQ ID NO: 18323 - DNA, 25 bp, Homo sapiens
gggatgtctcacaggtaagcaccag

SEQ ID NO: 18324 - DNA, 25 bp, Homo sapiens
taatcgtctttatctggcaggtcag

SEQ ID NO: 18325 - DNA, 25 bp, Homo sapiens
tagggttaatcgtctttatctggca

SEQ ID NO: 18326 - DNA, 25 bp, Homo sapiens
aaaacgtctgttgtatcactgaagt

SEQ ID NO: 18327 - DNA, 25 bp, Homo sapiens
atccagcagtgagaagcttccaggt

SEQ ID NO: 18328 - DNA, 25 bp, Homo sapiens
cctcctatacctagacatctcatct

SEQ ID NO: 18329 - DNA, 25 bp, Homo sapiens
gacatctcatctcaggaagtggtgg

SEQ ID NO: 18330 - DNA, 25 bp, Homo sapiens
gatccccaagatccacttttagaag

SEQ ID NO: 18331 - DNA, 25 bp, Homo sapiens
gcactgaatcaagtctaaccccaac

SEQ ID NO: 18332 - DNA, 25 bp, Homo sapiens
gtaaaccataatccacatgtgccgt

SEQ ID NO: 18333 - DNA, 25 bp, Homo sapiens
gtgccgtaaatgatcttcactcctt

SEQ ID NO: 18334 - DNA, 25 bp, Homo sapiens
tcttcactccttatccgagggcaaa

SEQ ID NO: 18335 - DNA, 25 bp, Homo sapiens
ttagaagccattctcatccagcagt

SEQ ID NO: 18336 - DNA, 25 bp, Homo sapiens
ttcctgtgcatgtgctcttattgta

SEQ ID NO: 18337 - DNA, 25 bp, Homo sapiens
aaatcatcgcccatgcgttattcct

SEQ ID NO: 18338 - DNA, 25 bp, Homo sapiens
agcatctgacggtcctcagtactga

SEQ ID NO: 18339 - DNA, 25 bp, Homo sapiens
attcctgagtgcattttcttacaac

SEQ ID NO: 18340 - DNA, 25 bp, Homo sapiens
cagtactgaactcccggaagctgct

SEQ ID NO: 18341 - DNA, 25 bp, Homo sapiens
cgaatgggcgtgaatccaccgtttc

SEQ ID NO: 18342 - DNA, 25 bp, Homo sapiens
gaatgctcaggtgcttacagtgttg

SEQ ID NO: 18343 - DNA, 25 bp, Homo sapiens
gaggagcctcagtgattgggtacaa

SEQ ID NO: 18344 - DNA, 25 bp, Homo sapiens
gcaaaaagaaccaccacagctgctc

SEQ ID NO: 18345 - DNA, 25 bp, Homo sapiens
gtcataatggcaacctccaagccct

SEQ ID NO: 18346 - DNA, 25 bp, Homo sapiens
tacagtgttgcaatccctaagagag

SEQ ID NO: 18347 - DNA, 25 bp, Homo sapiens
tgaaaaagaccttacacaccaccaa

SEQ ID NO: 18348 - DNA, 25 bp, Homo sapiens
aaatcaggcctacagcatcctgtgt

SEQ ID NO: 18349 - DNA, 25 bp, Homo sapiens
agatgcggagggcgcagatgtccca

SEQ ID NO: 18350 - DNA, 25 bp, Homo sapiens
attcagatgacacttaccagaccgc

SEQ ID NO: 18351 - DNA, 25 bp, Homo sapiens
cacctgaatgcctgctgtggtctga

SEQ ID NO: 18352 - DNA, 25 bp, Homo sapiens
cagggctggaggttctacaacagga

SEQ ID NO: 18353 - DNA, 25 bp, Homo sapiens
cgccctcttgagtggctcagatgag

SEQ ID NO: 18354 - DNA, 25 bp, Homo sapiens
gaatccggggtatgagcccaggaga

SEQ ID NO: 18355 - DNA, 25 bp, Homo sapiens
gcccaggagaacgtgctgcttttgg

SEQ ID NO: 18356 - DNA, 25 bp, Homo sapiens
gtctgtgttggtatagtacccttca

SEQ ID NO: 18357 - DNA, 25 bp, Homo sapiens
gtggtctgatcttaagggtctatat

SEQ ID NO: 18358 - DNA, 25 bp, Homo sapiens
tatatatttgcacctcctcattcaa

SEQ ID NO: 18359 - DNA, 25 bp, Homo sapiens
aagagcagttacagtgtgactcact

SEQ ID NO: 18360 - DNA, 25 bp, Homo sapiens
aagtattagcactgtggttgatttt

SEQ ID NO: 18361 - DNA, 25 bp, Homo sapiens
aggatcaaaaattgtggccatcttt

SEQ ID NO: 18362 - DNA, 25 bp, Homo sapiens
atacgtctaatttatgtaacccatt

SEQ ID NO: 18363 - DNA, 25 bp, Homo sapiens
atcacttttatgacccaaatcacaa

SEQ ID NO: 18364 - DNA, 25 bp, Homo sapiens
gcaaatgactacctatagcctgtga

SEQ ID NO: 18365 - DNA, 25 bp, Homo sapiens
ggaatgtatttctaggttctcttca

SEQ ID NO: 18366 - DNA, 25 bp, Homo sapiens
gtggccatctttgcaaatgactacc

SEQ ID NO: 18367 - DNA, 25 bp, Homo sapiens
gttacagtgtgactcactcatgttt

SEQ ID NO: 18368 - DNA, 25 bp, Homo sapiens
tgttgcatcttgtactactaagctt

SEQ ID NO: 18369 - DNA, 25 bp, Homo sapiens
ttctaggttctcttcaggattaatt

SEQ ID NO: 18370 - DNA, 25 bp, Homo sapiens
cattctttcgagtttgtttttgtca

SEQ ID NO: 18371 - DNA, 25 bp, Homo sapiens
gaaattagcctttgccttattctgt

SEQ ID NO: 18372 - DNA, 25 bp, Homo sapiens
gaactaggcctcaaaaacatacgta

SEQ ID NO: 18373 - DNA, 25 bp, Homo sapiens
gagagtactggttccttcagtagtg

SEQ ID NO: 18374 - DNA, 25 bp, Homo sapiens
gagtatttctcatagtgcagcttta

SEQ ID NO: 18375 - DNA, 25 bp, Homo sapiens
gcctagcgaggcaaattctgattga

SEQ ID NO: 18376 - DNA, 25 bp, Homo sapiens
gtaacagtcgtcgaactaggcctca

SEQ ID NO: 18377 - DNA, 25 bp, Homo sapiens
gtaagtaacttatttctgcactgtt

SEQ ID NO: 18378 - DNA, 25 bp, Homo sapiens
gtttctgtttgacgtttgagtgccg

SEQ ID NO: 18379 - DNA, 25 bp, Homo sapiens
gtttttgtcattttcgtaacagtcg

SEQ ID NO: 18380 - DNA, 25 bp, Homo sapiens
ttgagtgccggctttctgagtagag

SEQ ID NO: 18381 - DNA, 25 bp, Homo sapiens
aatagcattgcttcgtgcactttga

SEQ ID NO: 18382 - DNA, 25 bp, Homo sapiens
agcactctggactaatcgctaaaga

SEQ ID NO: 18383 - DNA, 25 bp, Homo sapiens
agttgtcacgttgcattcatgttca

SEQ ID NO: 18384 - DNA, 25 bp, Homo sapiens
attcatgttcacctcctgatttaag

SEQ ID NO: 18385 - DNA, 25 bp, Homo sapiens
catttgctatcatgcctatttttat

SEQ ID NO: 18386 - DNA, 25 bp, Homo sapiens
ggatgtgttcacatgtacccatcat

SEQ ID NO: 18387 - DNA, 25 bp, Homo sapiens
ggggttgcgagggatgtgttcacat

SEQ ID NO: 18388 - DNA, 25 bp, Homo sapiens
ggtgttttctgtgctactagttgtc

SEQ ID NO: 18389 - DNA, 25 bp, Homo sapiens
tcatcaggactgacacccaatttga

SEQ ID NO: 18390 - DNA, 25 bp, Homo sapiens
tgcccagccactaaagcactctgga

SEQ ID NO: 18391 - DNA, 25 bp, Homo sapiens
ttaagtatctcgggtgtgcccagcc

SEQ ID NO: 18392 - DNA, 25 bp, Homo sapiens
aaggaagtttagacctgcccaggtg

SEQ ID NO: 18393 - DNA, 25 bp, Homo sapiens
caggcggaggtgggacaaaggtcct

SEQ ID NO: 18394 - DNA, 25 bp, Homo sapiens
cggtccaccaggcggaggtgggaca

SEQ ID NO: 18395 - DNA, 25 bp, Homo sapiens
gaagtttagacctgcccaggtgtgg

SEQ ID NO: 18396 - DNA, 25 bp, Homo sapiens
gacctgcccaggtgtggagcgaggg

SEQ ID NO: 18397 - DNA, 25 bp, Homo sapiens
ggaggtgggacaaaggtcctaacag

SEQ ID NO: 18398 - DNA, 25 bp, Homo sapiens
ggcatcctaacctcagaaactgaaa

SEQ ID NO: 18399 - DNA, 25 bp, Homo sapiens
ggtcctaacaggagtcactggctca

SEQ ID NO: 18400 - DNA, 25 bp, Homo sapiens
gtttagacctgcccaggtgtggagc

SEQ ID NO: 18401 - DNA, 25 bp, Homo sapiens
taacaggagtcactggctcaggacc

SEQ ID NO: 18402 - DNA, 25 bp, Homo sapiens
tcctaacaggagtcactggctcagg

SEQ ID NO: 18403 - DNA, 25 bp, Homo sapiens
attgtgcttgtgtttcgtgatttct

SEQ ID NO: 18404 - DNA, 25 bp, Homo sapiens
catgggcctggatgcagatctgcgt

SEQ ID NO: 18405 - DNA, 25 bp, Homo sapiens
cgcagagaagccccgggcttggcgg

SEQ ID NO: 18406 - DNA, 25 bp, Homo sapiens
cttctcctgatcctgcaaggggaca

SEQ ID NO: 18407 - DNA, 25 bp, Homo sapiens
ctttgtcggtggctgtcgtgaaatt

SEQ ID NO: 18408 - DNA, 25 bp, Homo sapiens
gaggggcctagagctctaattgttt

SEQ ID NO: 18409 - DNA, 25 bp, Homo sapiens
gcttctgggaaacagtcccgcgtgc

SEQ ID NO: 18410 - DNA, 25 bp, Homo sapiens
tcaatttgtagactcttgctcctgc

SEQ ID NO: 18411 - DNA, 25 bp, Homo sapiens
tgattgtctcgcttgttttcagttg

SEQ ID NO: 18412 - DNA, 25 bp, Homo sapiens
tggaagcttactctctgcttccgtt

SEQ ID NO: 18413 - DNA, 25 bp, Homo sapiens
tttctttgggggtgattgtctcgct

SEQ ID NO: 18414 - DNA, 25 bp, Homo sapiens
agcgtcagaaaaatgcaccttcttc

SEQ ID NO: 18415 - DNA, 25 bp, Homo sapiens
cctgccagaggtacctcacggacag

SEQ ID NO: 18416 - DNA, 25 bp, Homo sapiens
gaaaatgcttttgaccagtgggtag

SEQ ID NO: 18417 - DNA, 25 bp, Homo sapiens
gagtttattaactgccaatccaaaa

SEQ ID NO: 18418 - DNA, 25 bp, Homo sapiens
gccaggttaatggtatcgatcctaa

SEQ ID NO: 18419 - DNA, 25 bp, Homo sapiens
gggattcggcagagtttgatttgtt

SEQ ID NO: 18420 - DNA, 25 bp, Homo sapiens
ggtacctcacggacaggaagccaga

SEQ ID NO: 18421 - DNA, 25 bp, Homo sapiens
ggtagccagcacagcgtcagaaaaa

SEQ ID NO: 18422 - DNA, 25 bp, Homo sapiens
gtatcgatcctaatggggattcggc

SEQ ID NO: 18423 - DNA, 25 bp, Homo sapiens
tccaccatacctgccagaggtacct

SEQ ID NO: 18424 - DNA, 25 bp, Homo sapiens
ttgaccagtgggtagccagcacagc

SEQ ID NO: 18425 - DNA, 25 bp, Homo sapiens
acagagaacgtgtcagttatgccaa

SEQ ID NO: 18426 - DNA, 25 bp, Homo sapiens
agcattgtcatcactcctaagctgc

SEQ ID NO: 18427 - DNA, 25 bp, Homo sapiens
atcatctttgtagcattgtcatcac

SEQ ID NO: 18428 - DNA, 25 bp, Homo sapiens
ctgccttcacagttttagtacacta

SEQ ID NO: 18429 - DNA, 25 bp, Homo sapiens
ggccattgcaatgtatcatctttgt

SEQ ID NO: 18430 - DNA, 25 bp, Homo sapiens
gggacatggaattaaggccattgca

SEQ ID NO: 18431 - DNA, 25 bp, Homo sapiens
gtcagttatgccaaaactcttttga

SEQ ID NO: 18432 - DNA, 25 bp, Homo sapiens
gtggcagaaccctgcagggacatgg

SEQ ID NO: 18433 - DNA, 25 bp, Homo sapiens
tgatttctgttccaggatttccaac

SEQ ID NO: 18434 - DNA, 25 bp, Homo sapiens
tgggcagagaaagctcatactgtat

SEQ ID NO: 18435 - DNA, 25 bp, Homo sapiens
tgtagcattgtcatcactcctaagc

SEQ ID NO: 18436 - DNA, 25 bp, Homo sapiens
aacttatattgcatgttctcttcct

SEQ ID NO: 18437 - DNA, 25 bp, Homo sapiens
aaggattcaactcgtgatacaccaa

SEQ ID NO: 18438 - DNA, 25 bp, Homo sapiens
aatttataacacctgctttagcctt

SEQ ID NO: 18439 - DNA, 25 bp, Homo sapiens
aattttctttgtggcagtcatttat

SEQ ID NO: 18440 - DNA, 25 bp, Homo sapiens
acacctgctttagcctttgttttca

SEQ ID NO: 18441 - DNA, 25 bp, Homo sapiens
cgaaggcaaaacctgagcagttcct

SEQ ID NO: 18442 - DNA, 25 bp, Homo sapiens
gtcagcttttttgaaaacacatcag

SEQ ID NO: 18443 - DNA, 25 bp, Homo sapiens
gttgacttcagagatgtgttccatg

SEQ ID NO: 18444 - DNA, 25 bp, Homo sapiens
tcagtgtctacatttcagaccgagt

SEQ ID NO: 18445 - DNA, 25 bp, Homo sapiens
tgttccatgctctctagcacaggaa

SEQ ID NO: 18446 - DNA, 25 bp, Homo sapiens
tttctacctggtaaacattctctat

SEQ ID NO: 18447 - DNA, 25 bp, Homo sapiens
acttgatctctgagctacaatactc

SEQ ID NO: 18448 - DNA, 25 bp, Homo sapiens
atggatgcgcagatataccctcagt

SEQ ID NO: 18449 - DNA, 25 bp, Homo sapiens
ccagtacttgatctctgagctacaa

SEQ ID NO: 18450 - DNA, 25 bp, Homo sapiens
ccatctccaactacatccttatgat

SEQ ID NO: 18451 - DNA, 25 bp, Homo sapiens
gattatagtgtccacttgccaccat

SEQ ID NO: 18452 - DNA, 25 bp, Homo sapiens
gcagatataccctcagttcagtcat

SEQ ID NO: 18453 - DNA, 25 bp, Homo sapiens
gtaaatgtatgtcgacactattcta

SEQ ID NO: 18454 - DNA, 25 bp, Homo sapiens
taaaataggtgtatgtcccaaccct

SEQ ID NO: 18455 - DNA, 25 bp, Homo sapiens
taccctcagttcagtcatagattgg

SEQ ID NO: 18456 - DNA, 25 bp, Homo sapiens
tatgtcccaacccttttttatacag

SEQ ID NO: 18457 - DNA, 25 bp, Homo sapiens
ttataactgccatctccaactacat

SEQ ID NO: 18458 - DNA, 25 bp, Homo sapiens
acagtagtacttctgttcactgaag

SEQ ID NO: 18459 - DNA, 25 bp, Homo sapiens
acctttgatcacttggagactcttt

SEQ ID NO: 18460 - DNA, 25 bp, Homo sapiens
agactctttttttgctggtttctag

SEQ ID NO: 18461 - DNA, 25 bp, Homo sapiens
ataccctttatgttcctgactgatg

SEQ ID NO: 18462 - DNA, 25 bp, Homo sapiens
gactgatgcgcagaacctgggggaa

SEQ ID NO: 18463 - DNA, 25 bp, Homo sapiens
gatagatccatatacctttgatcac

SEQ ID NO: 18464 - DNA, 25 bp, Homo sapiens
ggttgtccattgaattgtcacagca

SEQ ID NO: 18465 - DNA, 25 bp, Homo sapiens
tctcctctacgtggacttactgttg

SEQ ID NO: 18466 - DNA, 25 bp, Homo sapiens
tgaatactgttttgaccccaggcag

SEQ ID NO: 18467 - DNA, 25 bp, Homo sapiens
tgataacacaacagcaatcctctcc

SEQ ID NO: 18468 - DNA, 25 bp, Homo sapiens
tgctctttctctgaatactgttttg

SEQ ID NO: 18469 - DNA, 25 bp, Homo sapiens
aagatggcctatttcagctgctttt

SEQ ID NO: 18470 - DNA, 25 bp, Homo sapiens
atgagcactactctaccatggttct

SEQ ID NO: 18471 - DNA, 25 bp, Homo sapiens
caaagtgcccatggtggcggcgaag

SEQ ID NO: 18472 - DNA, 25 bp, Homo sapiens
gcaatcccatttgcaggatccgtct

SEQ ID NO: 18473 - DNA, 25 bp, Homo sapiens
gctccccaagacacatcctaaaagg

SEQ ID NO: 18474 - DNA, 25 bp, Homo sapiens
gctccctgacttaacgttctataca

SEQ ID NO: 18475 - DNA, 25 bp, Homo sapiens
gtcccttccaatgctgtgggtttcc

SEQ ID NO: 18476 - DNA, 25 bp, Homo sapiens
gtctgtgcacatgcctctgtagaga

SEQ ID NO: 18477 - DNA, 25 bp, Homo sapiens
tcccttttgcattgccaagtgccat

SEQ ID NO: 18478 - DNA, 25 bp, Homo sapiens
tggcactgtaaggtgcttgctcccc

SEQ ID NO: 18479 - DNA, 25 bp, Homo sapiens
ttgacgaaaatgactggctccctga

SEQ ID NO: 18480 - DNA, 25 bp, Homo sapiens
aatccacaaattccaatgtcacaaa

SEQ ID NO: 18481 - DNA, 25 bp, Homo sapiens
agagtcacgatcagaggaaccccag

SEQ ID NO: 18482 - DNA, 25 bp, Homo sapiens
cagggtctggtgatggcagggatgg

SEQ ID NO: 18483 - DNA, 25 bp, Homo sapiens
ccccagggtctggtgatggcaggga

SEQ ID NO: 18484 - DNA, 25 bp, Homo sapiens
ctagacccccacgtttggagattca

SEQ ID NO: 18485 - DNA, 25 bp, Homo sapiens
gaaaatccacaaattccaatgtcac

SEQ ID NO: 18486 - DNA, 25 bp, Homo sapiens
gattcaaaacttctgtcttcgtcct

SEQ ID NO: 18487 - DNA, 25 bp, Homo sapiens
ggaaccccagggtctggtgatggca

SEQ ID NO: 18488 - DNA, 25 bp, Homo sapiens
gtgtgggataaacagagtcacgatc

SEQ ID NO: 18489 - DNA, 25 bp, Homo sapiens
tatacttttcctcagaggagcaggc

SEQ ID NO: 18490 - DNA, 25 bp, Homo sapiens
tcctcagaggagcaggcaacagtgt

SEQ ID NO: 18491 - DNA, 25 bp, Homo sapiens
aaaacagctctcatttcatgccagt

SEQ ID NO: 18492 - DNA, 25 bp, Homo sapiens
aaacctgcaccgtcacaagatattc

SEQ ID NO: 18493 - DNA, 25 bp, Homo sapiens
aaccttcagctgtcttgcttatgta

SEQ ID NO: 18494 - DNA, 25 bp, Homo sapiens
atgccagttttgctcaaacctgcac

SEQ ID NO: 18495 - DNA, 25 bp, Homo sapiens
ccatcttgcaatcttcatctaaaac

SEQ ID NO: 18496 - DNA, 25 bp, Homo sapiens
gaaaacgtagaagacacccctgaat

SEQ ID NO: 18497 - DNA, 25 bp, Homo sapiens
ggcaagctcaccacaatgtaagcct

SEQ ID NO: 18498 - DNA, 25 bp, Homo sapiens
ggccaaccttgcttttgggaactgt

SEQ ID NO: 18499 - DNA, 25 bp, Homo sapiens
gtaagcctatggtctggccaacctt

SEQ ID NO: 18500 - DNA, 25 bp, Homo sapiens
tactccaaaacgtgcccagtgatcg

SEQ ID NO: 18501 - DNA, 25 bp, Homo sapiens
tttggggccatatgcaccaggtttc

SEQ ID NO: 18502 - DNA, 25 bp, Homo sapiens
aagcctagaattgtcagcacttcca

SEQ ID NO: 18503 - DNA, 25 bp, Homo sapiens
ccactttccaaatttcattcagaac

SEQ ID NO: 18504 - DNA, 25 bp, Homo sapiens
ccttttcctcccttaggagcattgg

SEQ ID NO: 18505 - DNA, 25 bp, Homo sapiens
gaagcatgcacatgccactgtcacc

SEQ ID NO: 18506 - DNA, 25 bp, Homo sapiens
gcacttccaacttcttgtttgacag

SEQ ID NO: 18507 - DNA, 25 bp, Homo sapiens
gctgcaatgtttttatgtttccttt

SEQ ID NO: 18508 - DNA, 25 bp, Homo sapiens
gggataactccaaaccgcatgaaag

SEQ ID NO: 18509 - DNA, 25 bp, Homo sapiens
gtcctctgttgtccatttttatcac

SEQ ID NO: 18510 - DNA, 25 bp, Homo sapiens
gttttccactgaagcatgcacatgc

SEQ ID NO: 18511 - DNA, 25 bp, Homo sapiens
taggagcattggtcctctgttgtcc

SEQ ID NO: 18512 - DNA, 25 bp, Homo sapiens
tggacgttaatgcccacttttctta

SEQ ID NO: 18513 - DNA, 25 bp, Homo sapiens
agagcagattcggccttgagaacgc

SEQ ID NO: 18514 - DNA, 25 bp, Homo sapiens
agaggagaccgaagtcaggccctga

SEQ ID NO: 18515 - DNA, 25 bp, Homo sapiens
agctccacatccagaggccggagat

SEQ ID NO: 18516 - DNA, 25 bp, Homo sapiens
atcctaatcatcttattcagcctat

SEQ ID NO: 18517 - DNA, 25 bp, Homo sapiens
ccaccctggagactgttgactctgg

SEQ ID NO: 18518 - DNA, 25 bp, Homo sapiens
gaaggctgggggctgtaagcctctc

SEQ ID NO: 18519 - DNA, 25 bp, Homo sapiens
ggccggagatggtagcatccactgt

SEQ ID NO: 18520 - DNA, 25 bp, Homo sapiens
ggtcctgctctgagctgacagactt

SEQ ID NO: 18521 - DNA, 25 bp, Homo sapiens
tgctcgcattgatcatcctaatcat

SEQ ID NO: 18522 - DNA, 25 bp, Homo sapiens
tgttgactctggcacagagctccac

SEQ ID NO: 18523 - DNA, 25 bp, Homo sapiens
ttgagaacgcctacaacaacttccg

SEQ ID NO: 18524 - DNA, 25 bp, Homo sapiens
aaacaagctaagacaagtattggag

SEQ ID NO: 18525 - DNA, 25 bp, Homo sapiens
aagctaagggcaaaatgtacaaact

SEQ ID NO: 18526 - DNA, 25 bp, Homo sapiens
aatattgtcaagagtttcagataga

SEQ ID NO: 18527 - DNA, 25 bp, Homo sapiens
aatgaaggtgacttaaacagcttaa

SEQ ID NO: 18528 - DNA, 25 bp, Homo sapiens
gaaggtgacttaaacagcttaaagt

SEQ ID NO: 18529 - DNA, 25 bp, Homo sapiens
gacagaagtacgggaaggcgaagaa

SEQ ID NO: 18530 - DNA, 25 bp, Homo sapiens
ggaagacagaagtacgggaaggcga

SEQ ID NO: 18531 - DNA, 25 bp, Homo sapiens
gggcaaaatgtacaaacttagaaga

SEQ ID NO: 18532 - DNA, 25 bp, Homo sapiens
taaaataatttgaaggcgatctttt

SEQ ID NO: 18533 - DNA, 25 bp, Homo sapiens
tagttaacgcatttactaaacgcag

SEQ ID NO: 18534 - DNA, 25 bp, Homo sapiens
ttaaagcctagttaacgcatttact

SEQ ID NO: 18535 - DNA, 25 bp, Homo sapiens
actccttgctgtttatctactgctt

SEQ ID NO: 18536 - DNA, 25 bp, Homo sapiens
agaattctagctttacctgcatccg

SEQ ID NO: 18537 - DNA, 25 bp, Homo sapiens
cctggcatctcagacatggttcctg

SEQ ID NO: 18538 - DNA, 25 bp, Homo sapiens
ggctatgtgtgtcttgtctgatgtc

SEQ ID NO: 18539 - DNA, 25 bp, Homo sapiens
taagttaacctgtgcctcatttgta

SEQ ID NO: 18540 - DNA, 25 bp, Homo sapiens
taatgctgtgctcactatcttgtcc

SEQ ID NO: 18541 - DNA, 25 bp, Homo sapiens
tacctgcatccgctgattcagtttt

SEQ ID NO: 18542 - DNA, 25 bp, Homo sapiens
tagctttgcctctatcagggctgga

SEQ ID NO: 18543 - DNA, 25 bp, Homo sapiens
tatgggtgatagcagccatgcccct

SEQ ID NO: 18544 - DNA, 25 bp, Homo sapiens
tcctgcctcacttgtgggagctgga

SEQ ID NO: 18545 - DNA, 25 bp, Homo sapiens
tccttcttttcctgaactcacagtc

SEQ ID NO: 18546 - DNA, 25 bp, Homo sapiens
agcaccgcagatgggaaccttaatc

SEQ ID NO: 18547 - DNA, 25 bp, Homo sapiens
aggacgtgttgaactagctctctgc

SEQ ID NO: 18548 - DNA, 25 bp, Homo sapiens
aggcctttggccaggtaatgcagtg

SEQ ID NO: 18549 - DNA, 25 bp, Homo sapiens
agtattcaggtccttgacatctccc

SEQ ID NO: 18550 - DNA, 25 bp, Homo sapiens
gacaatccatgtgcttctcttgtcc

SEQ ID NO: 18551 - DNA, 25 bp, Homo sapiens
gacatctcccaaatgtgtgattccg

SEQ ID NO: 18552 - DNA, 25 bp, Homo sapiens
gagggacgggtgatgggcagattgg

SEQ ID NO: 18553 - DNA, 25 bp, Homo sapiens
gatcctcagacaatccatgtgcttc

SEQ ID NO: 18554 - DNA, 25 bp, Homo sapiens
gtgtgattccgggatgccaaaggcc

SEQ ID NO: 18555 - DNA, 25 bp, Homo sapiens
tctgtctcatacccaaccagatttc

SEQ ID NO: 18556 - DNA, 25 bp, Homo sapiens
tgtgcgtgcttcttcagagggacgg

SEQ ID NO: 18557 - DNA, 25 bp, Homo sapiens
aaggtgttttgcaagagctgtattt

SEQ ID NO: 18558 - DNA, 25 bp, Homo sapiens
acgccacccaatgtatagccaaatt

SEQ ID NO: 18559 - DNA, 25 bp, Homo sapiens
atactcgggctgtttccaaatataa

SEQ ID NO: 18560 - DNA, 25 bp, Homo sapiens
atagagctgcatcacttaaattcat

SEQ ID NO: 18561 - DNA, 25 bp, Homo sapiens
attgcaatatcttatttcatctttc

SEQ ID NO: 18562 - DNA, 25 bp, Homo sapiens
gaagtgaagtttacgccacccaatg

SEQ ID NO: 18563 - DNA, 25 bp, Homo sapiens
gagtatgttcagttcgcagtaagta

SEQ ID NO: 18564 - DNA, 25 bp, Homo sapiens
gtacgtgcttaaaaaacagtgccga

SEQ ID NO: 18565 - DNA, 25 bp, Homo sapiens
taatacatgtacagtgcacactaga

SEQ ID NO: 18566 - DNA, 25 bp, Homo sapiens
tattagggcatactcgggctgtttc

SEQ ID NO: 18567 - DNA, 25 bp, Homo sapiens
ttggcttccaactaaaatacgtttg

SEQ ID NO: 18568 - DNA, 25 bp, Homo sapiens
aaatcctctacaaatccaaggcagg

SEQ ID NO: 18569 - DNA, 25 bp, Homo sapiens
acatttctcatattggggttcgaca

SEQ ID NO: 18570 - DNA, 25 bp, Homo sapiens
agtgcttcatccatttatcatgctt

SEQ ID NO: 18571 - DNA, 25 bp, Homo sapiens
atcacagtctgttgcttttgtacac

SEQ ID NO: 18572 - DNA, 25 bp, Homo sapiens
atggcgttttattttcatggcctat

SEQ ID NO: 18573 - DNA, 25 bp, Homo sapiens
cacatacctttttctatcacagtct

SEQ ID NO: 18574 - DNA, 25 bp, Homo sapiens
catgctttggtttgctaattttttc

SEQ ID NO: 18575 - DNA, 25 bp, Homo sapiens
catggcctataagcaggtaccttag

SEQ ID NO: 18576 - DNA, 25 bp, Homo sapiens
tataaggtaactctttagtcctcca

SEQ ID NO: 18577 - DNA, 25 bp, Homo sapiens
tggcagagtgactcattctcctgtc

SEQ ID NO: 18578 - DNA, 25 bp, Homo sapiens
ttagtcctccatttagcacatttta

SEQ ID NO: 18579 - DNA, 25 bp, Homo sapiens
aattcgttctgagcatgataccaca

SEQ ID NO: 18580 - DNA, 25 bp, Homo sapiens
atgtctgagcctggtgtttatgccc

SEQ ID NO: 18581 - DNA, 25 bp, Homo sapiens
ctcagtgcactcggtgtcatgtctg

SEQ ID NO: 18582 - DNA, 25 bp, Homo sapiens
gaaacccagttggaagcagctgccc

SEQ ID NO: 18583 - DNA, 25 bp, Homo sapiens
gagatgccatctactaaccaatttg

SEQ ID NO: 18584 - DNA, 25 bp, Homo sapiens
gcacctgtgctcatgagtgtttccg

SEQ ID NO: 18585 - DNA, 25 bp, Homo sapiens
gccagggaagctaacccagagcacg

SEQ ID NO: 18586 - DNA, 25 bp, Homo sapiens
ggaatttactcagttagcagcccct

SEQ ID NO: 18587 - DNA, 25 bp, Homo sapiens
gtcctaagtccctggcgaggggagg

SEQ ID NO: 18588 - DNA, 25 bp, Homo sapiens
tggagattctgttttactctgccta

SEQ ID NO: 18589 - DNA, 25 bp, Homo sapiens
tgggagcctgggacaggcgacccac

SEQ ID NO: 18590 - DNA, 25 bp, Homo sapiens
acctaccaggtcatgcgagagtgtg

SEQ ID NO: 18591 - DNA, 25 bp, Homo sapiens
ataaagaggatgcccacgtggcccc

SEQ ID NO: 18592 - DNA, 25 bp, Homo sapiens
cccaccaagagtgtcttcggctgag

SEQ ID NO: 18593 - DNA, 25 bp, Homo sapiens
cccgcacaggtaccgagactgtctt

SEQ ID NO: 18594 - DNA, 25 bp, Homo sapiens
ccgagactgtctttgagaagcccaa

SEQ ID NO: 18595 - DNA, 25 bp, Homo sapiens
ccgaggaaacctgaccaagaaccag

SEQ ID NO: 18596 - DNA, 25 bp, Homo sapiens
cctgccagagaggcgccttcagaga

SEQ ID NO: 18597 - DNA, 25 bp, Homo sapiens
ccttgctgcccgaatgctcggaaac

SEQ ID NO: 18598 - DNA, 25 bp, Homo sapiens
gaaacaggagccttacccaggaact

SEQ ID NO: 18599 - DNA, 25 bp, Homo sapiens
ttcggctgagaagtgtgcgccactc

SEQ ID NO: 18600 - DNA, 25 bp, Homo sapiens
ttttttatgccagaacgcttcctct

SEQ ID NO: 18601 - DNA, 25 bp, Homo sapiens
aacagagctttttctatacactatt

SEQ ID NO: 18602 - DNA, 25 bp, Homo sapiens
agaacttcttgcctaaacctgaatt

SEQ ID NO: 18603 - DNA, 25 bp, Homo sapiens
agacaattgctatggcagtttctaa

SEQ ID NO: 18604 - DNA, 25 bp, Homo sapiens
gaatgttttaaactactgggcactg

SEQ ID NO: 18605 - DNA, 25 bp, Homo sapiens
gcactgtggttatcattggtgatgc

SEQ ID NO: 18606 - DNA, 25 bp, Homo sapiens
gtgacggctgcaaggtacttttatt

SEQ ID NO: 18607 - DNA, 25 bp, Homo sapiens
gttggttcaaagttcagcactgtgg

SEQ ID NO: 18608 - DNA, 25 bp, Homo sapiens
taccgcaatttgctgagtgactttg

SEQ ID NO: 18609 - DNA, 25 bp, Homo sapiens
tgaaaagcttgcgattgcttcccac

SEQ ID NO: 18610 - DNA, 25 bp, Homo sapiens
ttgcgattgcttcccacaagaatgg

SEQ ID NO: 18611 - DNA, 25 bp, Homo sapiens
tttattgaacattcccctttttcag

SEQ ID NO: 18612 - DNA, 25 bp, Homo sapiens
aaagcttctaagtgaaacctgtagt

SEQ ID NO: 18613 - DNA, 25 bp, Homo sapiens
aacagccaatggtaaatgccctata

SEQ ID NO: 18614 - DNA, 25 bp, Homo sapiens
aactgccgggcagcaaagcttctaa

SEQ ID NO: 18615 - DNA, 25 bp, Homo sapiens
aatgccctatacttgagtcttactt

SEQ ID NO: 18616 - DNA, 25 bp, Homo sapiens
aattgtaatcatcctatgccaacat

SEQ ID NO: 18617 - DNA, 25 bp, Homo sapiens
gagtggcagtctctgaagtcatttg

SEQ ID NO: 18618 - DNA, 25 bp, Homo sapiens
gataatactcccagaacagccaatg

SEQ ID NO: 18619 - DNA, 25 bp, Homo sapiens
gatactgctatttctcttcagggaa

SEQ ID NO: 18620 - DNA, 25 bp, Homo sapiens
gatgctgtggtaatgcaccatttta

SEQ ID NO: 18621 - DNA, 25 bp, Homo sapiens
gcaatgttgcatgctcacataattg

SEQ ID NO: 18622 - DNA, 25 bp, Homo sapiens
gtcttaatagaccctaaattgttct

SEQ ID NO: 18623 - DNA, 25 bp, Homo sapiens
aataggttctggtagcttctgtgcc

SEQ ID NO: 18624 - DNA, 25 bp, Homo sapiens
agcctcacattctctcaagacagtt

SEQ ID NO: 18625 - DNA, 25 bp, Homo sapiens
caagggtgctctgaacatattttat

SEQ ID NO: 18626 - DNA, 25 bp, Homo sapiens
ctctcagttaccagctctttggaga

SEQ ID NO: 18627 - DNA, 25 bp, Homo sapiens
gaaacccacctaccataagatgtct

SEQ ID NO: 18628 - DNA, 25 bp, Homo sapiens
ggcttctctcaatggcttgtgttga

SEQ ID NO: 18629 - DNA, 25 bp, Homo sapiens
gggggtcaggcattttatatcaagg

SEQ ID NO: 18630 - DNA, 25 bp, Homo sapiens
gtgtggagattgcatttctggcttc

SEQ ID NO: 18631 - DNA, 25 bp, Homo sapiens
taagatgtcttcaggtggccttgtc

SEQ ID NO: 18632 - DNA, 25 bp, Homo sapiens
taggtgagagtagaaacccttccct

SEQ ID NO: 18633 - DNA, 25 bp, Homo sapiens
tgctctaggagctgagttgctggtt

SEQ ID NO: 18634 - DNA, 25 bp, Homo sapiens
aaacacagccgagaagttgcttctt

SEQ ID NO: 18635 - DNA, 25 bp, Homo sapiens
agagcatacaatagcgcctacttca

SEQ ID NO: 18636 - DNA, 25 bp, Homo sapiens
ccgactgtgccacgtggtaggacac

SEQ ID NO: 18637 - DNA, 25 bp, Homo sapiens
gaccaagcaacgctaacttttgtac

SEQ ID NO: 18638 - DNA, 25 bp, Homo sapiens
gcccatgactgtgccatgtggtagg

SEQ ID NO: 18639 - DNA, 25 bp, Homo sapiens
gcctacttcacggaaacttgtgcct

SEQ ID NO: 18640 - DNA, 25 bp, Homo sapiens
ggaattcctggaaagtggtggcttc

SEQ ID NO: 18641 - DNA, 25 bp, Homo sapiens
gtgccacctaccaagctgtgaaact

SEQ ID NO: 18642 - DNA, 25 bp, Homo sapiens
taaacgtcgttagggcctcagttct

SEQ ID NO: 18643 - DNA, 25 bp, Homo sapiens
tagacgagtcatacctgattcacct

SEQ ID NO: 18644 - DNA, 25 bp, Homo sapiens
tcagaagtgatcttggctcgcaggc

SEQ ID NO: 18645 - DNA, 25 bp, Homo sapiens
atacatatccacacttgtctgcaag

SEQ ID NO: 18646 - DNA, 25 bp, Homo sapiens
atggaatgctacatgctttctgttt

SEQ ID NO: 18647 - DNA, 25 bp, Homo sapiens
cacatcccagagacatcagaaacca

SEQ ID NO: 18648 - DNA, 25 bp, Homo sapiens
catatgcacgctgttcttgcttcat

SEQ ID NO: 18649 - DNA, 25 bp, Homo sapiens
gatggacactggccattctggtcat

SEQ ID NO: 18650 - DNA, 25 bp, Homo sapiens
ggtgccaggaaggtcacagatggac

SEQ ID NO: 18651 - DNA, 25 bp, Homo sapiens
gtttgtttgtaatagcacatcccag

SEQ ID NO: 18652 - DNA, 25 bp, Homo sapiens
tactctatggacttacccactgcta

SEQ ID NO: 18653 - DNA, 25 bp, Homo sapiens
tcatctcagtctggaactcagtccc

SEQ ID NO: 18654 - DNA, 25 bp, Homo sapiens
tgaatttaagcttcaggtccctttg

SEQ ID NO: 18655 - DNA, 25 bp, Homo sapiens
ttctgtttttctcattttggatttc

SEQ ID NO: 18656 - DNA, 25 bp, Homo sapiens
aacaagacaccaaaggcaccacaga

SEQ ID NO: 18657 - DNA, 25 bp, Homo sapiens
actgtagcttcctagctagtgtcat

SEQ ID NO: 18658 - DNA, 25 bp, Homo sapiens
cagctaagaagctttgctctgcctt

SEQ ID NO: 18659 - DNA, 25 bp, Homo sapiens
ccacccctaaatcattccagtgctc

SEQ ID NO: 18660 - DNA, 25 bp, Homo sapiens
gaagacagtgagcacacctaccaga

SEQ ID NO: 18661 - DNA, 25 bp, Homo sapiens
gagcctgccagcaatttctcaaaca

SEQ ID NO: 18662 - DNA, 25 bp, Homo sapiens
gccaaagaagcagtgcccctgtgat

SEQ ID NO: 18663 - DNA, 25 bp, Homo sapiens
gcccactcttccaattaaacattct

SEQ ID NO: 18664 - DNA, 25 bp, Homo sapiens
gttcctgagagccccgagaagaaaa

SEQ ID NO: 18665 - DNA, 25 bp, Homo sapiens
tacccaggcttaggcttaattacct

SEQ ID NO: 18666 - DNA, 25 bp, Homo sapiens
tgcctttgtaggagctctgagcgcc

SEQ ID NO: 18667 - DNA, 25 bp, Homo sapiens
aaagtaggaactgccacacaggccc

SEQ ID NO: 18668 - DNA, 25 bp, Homo sapiens
atatgggaacttctgtgtttgggat

SEQ ID NO: 18669 - DNA, 25 bp, Homo sapiens
caccctctgggattcataatgccat

SEQ ID NO: 18670 - DNA, 25 bp, Homo sapiens
catattggttacaccctctgggatt

SEQ ID NO: 18671 - DNA, 25 bp, Homo sapiens
ctctccacatgtgctctactagtga

SEQ ID NO: 18672 - DNA, 25 bp, Homo sapiens
gaatgaggcagatcccagagcaagg

SEQ ID NO: 18673 - DNA, 25 bp, Homo sapiens
gagggttgacagaaacacacgcgag

SEQ ID NO: 18674 - DNA, 25 bp, Homo sapiens
ggagactgaactgaccacatgtatt

SEQ ID NO: 18675 - DNA, 25 bp, Homo sapiens
gggatgtcctactgtaagactgatg

SEQ ID NO: 18676 - DNA, 25 bp, Homo sapiens
tcttgggtcttcgttttcctattag

SEQ ID NO: 18677 - DNA, 25 bp, Homo sapiens
ttcagggtacagttttgccttaatg

SEQ ID NO: 18678 - DNA, 25 bp, Homo sapiens
atgtggtttggggctcagggtggcc

SEQ ID NO: 18679 - DNA, 25 bp, Homo sapiens
cccttgccctgggttttgacacagc

SEQ ID NO: 18680 - DNA, 25 bp, Homo sapiens
ctatggagttctacctggagcccag

SEQ ID NO: 18681 - DNA, 25 bp, Homo sapiens
ctcctctcatctgcatttctcagaa

SEQ ID NO: 18682 - DNA, 25 bp, Homo sapiens
gcatgctcaggttctcagtctatga

SEQ ID NO: 18683 - DNA, 25 bp, Homo sapiens
gtaacaatgctaacccttgctggaa

SEQ ID NO: 18684 - DNA, 25 bp, Homo sapiens
gtctgtggatgaccattgtctgcag

SEQ ID NO: 18685 - DNA, 25 bp, Homo sapiens
ttgacacagcctgtgctcacagcct

SEQ ID NO: 18686 - DNA, 25 bp, Homo sapiens
ttgccaaagccaccacacgtgtggt

SEQ ID NO: 18687 - DNA, 25 bp, Homo sapiens
ttggtgcaggatcattttggctact

SEQ ID NO: 18688 - DNA, 25 bp, Homo sapiens
tttacaaagcagacatcccttcacc

SEQ ID NO: 18689 - DNA, 25 bp, Homo sapiens
aactgcacggagttttccttcattc

SEQ ID NO: 18690 - DNA, 25 bp, Homo sapiens
aagcaaacaccgtatcactctgatt

SEQ ID NO: 18691 - DNA, 25 bp, Homo sapiens
acctcagtggacaccaacaatccca

SEQ ID NO: 18692 - DNA, 25 bp, Homo sapiens
agttggcgctgaaagtccacacacc

SEQ ID NO: 18693 - DNA, 25 bp, Homo sapiens
cagtcctttgacttcagcagagcgt

SEQ ID NO: 18694 - DNA, 25 bp, Homo sapiens
ctcgttccgcgggtgtttgaggaag

SEQ ID NO: 18695 - DNA, 25 bp, Homo sapiens
gaagcaaaaatgcctgcgcagccag

SEQ ID NO: 18696 - DNA, 25 bp, Homo sapiens
gaatctcttcagttcatatttcatt

SEQ ID NO: 18697 - DNA, 25 bp, Homo sapiens
ggacggcaaggtcttgttccatgtc

SEQ ID NO: 18698 - DNA, 25 bp, Homo sapiens
tgattaagagcccgcaggtgcagtc

SEQ ID NO: 18699 - DNA, 25 bp, Homo sapiens
tgggaccgagtcctgaacttcaagc

SEQ ID NO: 18700 - DNA, 25 bp, Homo sapiens
aagagtgtgtggcctttgttgtgat

SEQ ID NO: 18701 - DNA, 25 bp, Homo sapiens
acagttgtggttggtcaggacggaa

SEQ ID NO: 18702 - DNA, 25 bp, Homo sapiens
agttcttggctgttaaccgtagata

SEQ ID NO: 18703 - DNA, 25 bp, Homo sapiens
ataagcactggtctaacacagccaa

SEQ ID NO: 18704 - DNA, 25 bp, Homo sapiens
ctcctccacagcgccatattaatgg

SEQ ID NO: 18705 - DNA, 25 bp, Homo sapiens
gagccacaagtgagaactccactgt

SEQ ID NO: 18706 - DNA, 25 bp, Homo sapiens
gcatgagccaaactgttgcatcata

SEQ ID NO: 18707 - DNA, 25 bp, Homo sapiens
ggaaggtgaaatctactgcatggga

SEQ ID NO: 18708 - DNA, 25 bp, Homo sapiens
tattttgatcatctttgtccaccct

SEQ ID NO: 18709 - DNA, 25 bp, Homo sapiens
tggttcgattccacgcaaggagcca

SEQ ID NO: 18710 - DNA, 25 bp, Homo sapiens
tgtccacccttattagttcttggct

SEQ ID NO: 18711 - DNA, 25 bp, Homo sapiens
aacactctcgctgaacacttttata

SEQ ID NO: 18712 - DNA, 25 bp, Homo sapiens
aacgatctttttacctggatatgtc

SEQ ID NO: 18713 - DNA, 25 bp, Homo sapiens
ctctcgctgaacacttttataattg

SEQ ID NO: 18714 - DNA, 25 bp, Homo sapiens
ctgcgtctggaggattgatatttat

SEQ ID NO: 18715 - DNA, 25 bp, Homo sapiens
gaactctgctgtgagtgtgtgcggg

SEQ ID NO: 18716 - DNA, 25 bp, Homo sapiens
tcccagtgcgaactctgctgtgagt

SEQ ID NO: 18717 - DNA, 25 bp, Homo sapiens
tgcgatggctgaaggcatttattta

SEQ ID NO: 18718 - DNA, 25 bp, Homo sapiens
tggatatgtctgtgaggctcctgaa

SEQ ID NO: 18719 - DNA, 25 bp, Homo sapiens
ttatttttgcattgcgatggctgaa

SEQ ID NO: 18720 - DNA, 25 bp, Homo sapiens
ttgttaggcgtggccgttgggactt

SEQ ID NO: 18721 - DNA, 25 bp, Homo sapiens
tttataattgttaggcgtggccgtt

SEQ ID NO: 18722 - DNA, 25 bp, Homo sapiens
atctatggtgtttccttgttctgtg

SEQ ID NO: 18723 - DNA, 25 bp, Homo sapiens
attcaactggggaccaggctggtct

SEQ ID NO: 18724 - DNA, 25 bp, Homo sapiens
cccaactgctctttctaatttattc

SEQ ID NO: 18725 - DNA, 25 bp, Homo sapiens
gagatgtcaccttatgcaatttgca

SEQ ID NO: 18726 - DNA, 25 bp, Homo sapiens
gaggaacaatagctctcacgtctct

SEQ ID NO: 18727 - DNA, 25 bp, Homo sapiens
gaggcttccctcagatcaaggagcc

SEQ ID NO: 18728 - DNA, 25 bp, Homo sapiens
gcagatgatctatctctgtggccac

SEQ ID NO: 18729 - DNA, 25 bp, Homo sapiens
tctcctcatcagattctaactaagc

SEQ ID NO: 18730 - DNA, 25 bp, Homo sapiens
tgcagttgcctctcgataggcctga

SEQ ID NO: 18731 - DNA, 25 bp, Homo sapiens
tgcatatcatattcaattcccccaa

SEQ ID NO: 18732 - DNA, 25 bp, Homo sapiens
tggtctcatgccaacctaggagatg

SEQ ID NO: 18733 - DNA, 25 bp, Homo sapiens
aacgcctgatagcttctttggcctt

SEQ ID NO: 18734 - DNA, 25 bp, Homo sapiens
aagttatttatttctatggcattcc

SEQ ID NO: 18735 - DNA, 25 bp, Homo sapiens
atgagtgcatttcaactatgtcaat

SEQ ID NO: 18736 - DNA, 25 bp, Homo sapiens
atggcattccagcggatattttggt

SEQ ID NO: 18737 - DNA, 25 bp, Homo sapiens
gatattttggtgtttgcgaggcatg

SEQ ID NO: 18738 - DNA, 25 bp, Homo sapiens
gcagttctttaaccaatgtctgttt

SEQ ID NO: 18739 - DNA, 25 bp, Homo sapiens
gccaagataatctgaagcctgtttt

SEQ ID NO: 18740 - DNA, 25 bp, Homo sapiens
gcgaggcatgcagtcaatattttgt

SEQ ID NO: 18741 - DNA, 25 bp, Homo sapiens
tagtggacagtattcagcaacgcct

SEQ ID NO: 18742 - DNA, 25 bp, Homo sapiens
tatgttctgtggttgatgttgtttg

SEQ ID NO: 18743 - DNA, 25 bp, Homo sapiens
ttaccctctatttaaatgctttgaa

SEQ ID NO: 18744 - DNA, 25 bp, Homo sapiens
aaaccctaatcagttatcttgtgtg

SEQ ID NO: 18745 - DNA, 25 bp, Homo sapiens
aacgtgttcttttttctgtatgtat

SEQ ID NO: 18746 - DNA, 25 bp, Homo sapiens
aactcagttctggggtggttttgca

SEQ ID NO: 18747 - DNA, 25 bp, Homo sapiens
cataaagttttgccaacgtgttctt

SEQ ID NO: 18748 - DNA, 25 bp, Homo sapiens
ccctgtcgccggaacaaccagaatg

SEQ ID NO: 18749 - DNA, 25 bp, Homo sapiens
cgctgccggcacagtacaagttgat

SEQ ID NO: 18750 - DNA, 25 bp, Homo sapiens
gaaactccatagtattccttgtaga

SEQ ID NO: 18751 - DNA, 25 bp, Homo sapiens
gattctttgtaaatgtcctgctttt

SEQ ID NO: 18752 - DNA, 25 bp, Homo sapiens
gtatatttcaccgtatccaattgta

SEQ ID NO: 18753 - DNA, 25 bp, Homo sapiens
tagaattgggcttttgtcatttcaa

SEQ ID NO: 18754 - DNA, 25 bp, Homo sapiens
tatttacatgccttagcacacgccc

SEQ ID NO: 18755 - DNA, 25 bp, Homo sapiens
aaaggccctcttgagagtctatcca

SEQ ID NO: 18756 - DNA, 25 bp, Homo sapiens
agggctgtgctggtgtaaatggtga

SEQ ID NO: 18757 - DNA, 25 bp, Homo sapiens
ataggttgtgctgtggacccaatgt

SEQ ID NO: 18758 - DNA, 25 bp, Homo sapiens
gagctgaggaattggcctcccaatc

SEQ ID NO: 18759 - DNA, 25 bp, Homo sapiens
gagtctactgaacatcaagcttgct

SEQ ID NO: 18760 - DNA, 25 bp, Homo sapiens
gagtctatccagggacccattgttt

SEQ ID NO: 18761 - DNA, 25 bp, Homo sapiens
gagtgtgtgtgcatcttgacaatat

SEQ ID NO: 18762 - DNA, 25 bp, Homo sapiens
gcctcccaatccgaacaggtgttat

SEQ ID NO: 18763 - DNA, 25 bp, Homo sapiens
tacccccaggggataccgaatgtgt

SEQ ID NO: 18764 - DNA, 25 bp, Homo sapiens
tgagcccaagcaggcacattctctt

SEQ ID NO: 18765 - DNA, 25 bp, Homo sapiens
ttgagctggggggatgctttcgggg

SEQ ID NO: 18766 - DNA, 25 bp, Homo sapiens
aatgtgtttgtatccagagtcttcc

SEQ ID NO: 18767 - DNA, 25 bp, Homo sapiens
ataaccacttggtactacacccaga

SEQ ID NO: 18768 - DNA, 25 bp, Homo sapiens
atatgggtgtccttttgtacgtcta

SEQ ID NO: 18769 - DNA, 25 bp, Homo sapiens
atgttaggatttttcggcatcgcat

SEQ ID NO: 18770 - DNA, 25 bp, Homo sapiens
caatgctctcctaatatccatacgc

SEQ ID NO: 18771 - DNA, 25 bp, Homo sapiens
cggcatcgcatgttagaatctctaa

SEQ ID NO: 18772 - DNA, 25 bp, Homo sapiens
ctggcacaaccctgacattactaag

SEQ ID NO: 18773 - DNA, 25 bp, Homo sapiens
gacacaaattcactagtctgtttaa

SEQ ID NO: 18774 - DNA, 25 bp, Homo sapiens
gtacgtctaggcctaggtaaccagt

SEQ ID NO: 18775 - DNA, 25 bp, Homo sapiens
tattgactggtgttccacatatttc

SEQ ID NO: 18776 - DNA, 25 bp, Homo sapiens
tgaaggccaatatcataccattaac

SEQ ID NO: 18777 - DNA, 25 bp, Homo sapiens
aatctctatgaatccttgagggcct

SEQ ID NO: 18778 - DNA, 25 bp, Homo sapiens
atttcatcccacttttcaggactta

SEQ ID NO: 18779 - DNA, 25 bp, Homo sapiens
cacagctgctagaagtatcctccat

SEQ ID NO: 18780 - DNA, 25 bp, Homo sapiens
ctgtgtggtcacatagagttccttt

SEQ ID NO: 18781 - DNA, 25 bp, Homo sapiens
gaagtggagagccagaatgctacaa

SEQ ID NO: 18782 - DNA, 25 bp, Homo sapiens
gaatccttgagggcctatatctata

SEQ ID NO: 18783 - DNA, 25 bp, Homo sapiens
gtatcctccatagaaacatcaacat

SEQ ID NO: 18784 - DNA, 25 bp, Homo sapiens
taacctccctgtagtctttaaaatg

SEQ ID NO: 18785 - DNA, 25 bp, Homo sapiens
tatgggactttgccatttacagcct

SEQ ID NO: 18786 - DNA, 25 bp, Homo sapiens
tgtttgggtttgcttacctaacaag

SEQ ID NO: 18787 - DNA, 25 bp, Homo sapiens
ttccattaccctttatttctgctaa

SEQ ID NO: 18788 - DNA, 25 bp, Homo sapiens
aaaccttcattgagacccaagcggt

SEQ ID NO: 18789 - DNA, 25 bp, Homo sapiens
agactaggcagctcacacaggtgtc

SEQ ID NO: 18790 - DNA, 25 bp, Homo sapiens
ccgtgactggtcacgatctgccagg

SEQ ID NO: 18791 - DNA, 25 bp, Homo sapiens
cctcttcctcatccgtagtgacagg

SEQ ID NO: 18792 - DNA, 25 bp, Homo sapiens
gccccagaaccctcatgtttgggtc

SEQ ID NO: 18793 - DNA, 25 bp, Homo sapiens
taaacactttcataggccttgtccc

SEQ ID NO: 18794 - DNA, 25 bp, Homo sapiens
tccatcctgataacaccccagtgaa

SEQ ID NO: 18795 - DNA, 25 bp, Homo sapiens
tctttctcacaggccgcattgaagg

SEQ ID NO: 18796 - DNA, 25 bp, Homo sapiens
ttgcagtagcttcccctggagaaga

SEQ ID NO: 18797 - DNA, 25 bp, Homo sapiens
tttgacctagcctggctggtgggcc

SEQ ID NO: 18798 - DNA, 25 bp, Homo sapiens
tttgatcatgatagcttccactccg

SEQ ID NO: 18799 - DNA, 25 bp, Homo sapiens
aacttatcctcatatgtacaacaat

SEQ ID NO: 18800 - DNA, 25 bp, Homo sapiens
acgcctgaaggatattactagtgcc

SEQ ID NO: 18801 - DNA, 25 bp, Homo sapiens
actactctacacagatcagactcat

SEQ ID NO: 18802 - DNA, 25 bp, Homo sapiens
atcagtgcagccaacattatttatg

SEQ ID NO: 18803 - DNA, 25 bp, Homo sapiens
ctgacaccccatacataatatacac

SEQ ID NO: 18804 - DNA, 25 bp, Homo sapiens
ctgcgtgttcgcatcaacttggaag

SEQ ID NO: 18805 - DNA, 25 bp, Homo sapiens
gactcatgtgcagaatcgtgcctgg

SEQ ID NO: 18806 - DNA, 25 bp, Homo sapiens
gactttctgcactaaaacttatcct

SEQ ID NO: 18807 - DNA, 25 bp, Homo sapiens
gatgtgtacatttctgacaccccat

SEQ ID NO: 18808 - DNA, 25 bp, Homo sapiens
gcatttttgatgatactactctaca

SEQ ID NO: 18809 - DNA, 25 bp, Homo sapiens
ggaaacttgaaacccacaatctaat

SEQ ID NO: 18810 - DNA, 25 bp, Homo sapiens
agaaacaacattagccctcttctct

SEQ ID NO: 18811 - DNA, 25 bp, Homo sapiens
agctaaccctattctcttagtcttt

SEQ ID NO: 18812 - DNA, 25 bp, Homo sapiens
ataaataattctaccattctatgga

SEQ ID NO: 18813 - DNA, 25 bp, Homo sapiens
attagtttttcaggtgaggcattcc

SEQ ID NO: 18814 - DNA, 25 bp, Homo sapiens
attttaaggcttgtattgtttgatt

SEQ ID NO: 18815 - DNA, 25 bp, Homo sapiens
ctatggaagtatttgtgggtcacag

SEQ ID NO: 18816 - DNA, 25 bp, Homo sapiens
gaatgggtccaataatggctataag

SEQ ID NO: 18817 - DNA, 25 bp, Homo sapiens
gcaattcctgttagcaaaacttcta

SEQ ID NO: 18818 - DNA, 25 bp, Homo sapiens
tgagccagcatttcccatagctaac

SEQ ID NO: 18819 - DNA, 25 bp, Homo sapiens
tgaggcattcctagttgcaattcct

SEQ ID NO: 18820 - DNA, 25 bp, Homo sapiens
tgcaggattcttccagtgagccagc

SEQ ID NO: 18821 - DNA, 25 bp, Homo sapiens
aatttttggccatcctgaggcattt

SEQ ID NO: 18822 - DNA, 25 bp, Homo sapiens
cctccacttcgtacttctgtataga

SEQ ID NO: 18823 - DNA, 25 bp, Homo sapiens
gaaaacggattcattttcccatcgg

SEQ ID NO: 18824 - DNA, 25 bp, Homo sapiens
gaaccagttctgcgattagacaatg

SEQ ID NO: 18825 - DNA, 25 bp, Homo sapiens
gacaatgcaccggaaccttatgatg

SEQ ID NO: 18826 - DNA, 25 bp, Homo sapiens
gatgtatcatccaaaggttttcttt

SEQ ID NO: 18827 - DNA, 25 bp, Homo sapiens
gcacgtgatggcattcctatggatg

SEQ ID NO: 18828 - DNA, 25 bp, Homo sapiens
ggaattctagctactacaatccaac

SEQ ID NO: 18829 - DNA, 25 bp, Homo sapiens
tactcttgtgggctacttgttgtgt

SEQ ID NO: 18830 - DNA, 25 bp, Homo sapiens
tcctatggatgacatacctccactt

SEQ ID NO: 18831 - DNA, 25 bp, Homo sapiens
ttcccatcggcgactttatgacgac

SEQ ID NO: 18832 - DNA, 25 bp, Homo sapiens
agaaatcagcaacaaatacctcctt

SEQ ID NO: 18833 - DNA, 25 bp, Homo sapiens
atacctccttgtgctatttgaatgc

SEQ ID NO: 18834 - DNA, 25 bp, Homo sapiens
atctgccacattgtttccttttatc

SEQ ID NO: 18835 - DNA, 25 bp, Homo sapiens
atttttactggcactggctggcgtt

SEQ ID NO: 18836 - DNA, 25 bp, Homo sapiens
caagagccagactagctcgagctag

SEQ ID NO: 18837 - DNA, 25 bp, Homo sapiens
gaatcaccactgtctattttatgaa

SEQ ID NO: 18838 - DNA, 25 bp, Homo sapiens
gatgacactattactgtttacctgt

SEQ ID NO: 18839 - DNA, 25 bp, Homo sapiens
gcagtctctgttgctgattatatga

SEQ ID NO: 18840 - DNA, 25 bp, Homo sapiens
gccttcgctcctctagtgaggggaa

SEQ ID NO: 18841 - DNA, 25 bp, Homo sapiens
gctggcgttcagctgaggaaggcta

SEQ ID NO: 18842 - DNA, 25 bp, Homo sapiens
gtatgtctcattaagcagtctctgt

SEQ ID NO: 18843 - DNA, 25 bp, Homo sapiens
aattcctgtggttattggtgctaaa

SEQ ID NO: 18844 - DNA, 25 bp, Homo sapiens
agatctattgtactgtctgttcctt

SEQ ID NO: 18845 - DNA, 25 bp, Homo sapiens
cactgaaactgactgcatcttgcaa

SEQ ID NO: 18846 - DNA, 25 bp, Homo sapiens
gaaaggcgattcaaaccagatcttg

SEQ ID NO: 18847 - DNA, 25 bp, Homo sapiens
gaaattgccaggttcctgtgacttt

SEQ ID NO: 18848 - DNA, 25 bp, Homo sapiens
gaatgctacatcttatcagatctat

SEQ ID NO: 18849 - DNA, 25 bp, Homo sapiens
gcaggattctaacaatgcctctgcc

SEQ ID NO: 18850 - DNA, 25 bp, Homo sapiens
gcatttggggacttcactgaaactg

SEQ ID NO: 18851 - DNA, 25 bp, Homo sapiens
ggagtggtgtgtactgcaggattct

SEQ ID NO: 18852 - DNA, 25 bp, Homo sapiens
gtctgttccttctcataattaatta

SEQ ID NO: 18853 - DNA, 25 bp, Homo sapiens
ttgcatagtgctttctgattggtca

SEQ ID NO: 18854 - DNA, 25 bp, Homo sapiens
ctggcgcttctgacttcaggagcga

SEQ ID NO: 18855 - DNA, 25 bp, Homo sapiens
gaagcccccagatgactgagcagtt

SEQ ID NO: 18856 - DNA, 25 bp, Homo sapiens
gacagcagagagtcaatttcccttt

SEQ ID NO: 18857 - DNA, 25 bp, Homo sapiens
gagagccaaaggctggcgcttctga

SEQ ID NO: 18858 - DNA, 25 bp, Homo sapiens
gccacccactgattgggcaattgtg

SEQ ID NO: 18859 - DNA, 25 bp, Homo sapiens
gccagcacgagcggggactagaggg

SEQ ID NO: 18860 - DNA, 25 bp, Homo sapiens
gccttctgtctgtcccagataaagg

SEQ ID NO: 18861 - DNA, 25 bp, Homo sapiens
tccaccaaatcgctcccaattttga

SEQ ID NO: 18862 - DNA, 25 bp, Homo sapiens
tgctcttttcaaaacctaccagtcc

SEQ ID NO: 18863 - DNA, 25 bp, Homo sapiens
tggctaattgtcttcggccaaccag

SEQ ID NO: 18864 - DNA, 25 bp, Homo sapiens
tgtgggcccatggggtggaagcccc

SEQ ID NO: 18865 - DNA, 25 bp, Homo sapiens
agttggtgttgcccaatcagcactc

SEQ ID NO: 18866 - DNA, 25 bp, Homo sapiens
ctacctttgctttcagaaccactta

SEQ ID NO: 18867 - DNA, 25 bp, Homo sapiens
gagagggaccagttggtgttgccca

SEQ ID NO: 18868 - DNA, 25 bp, Homo sapiens
gagcgcacggtggtagcagagtcga

SEQ ID NO: 18869 - DNA, 25 bp, Homo sapiens
gattcttgcgatgtatgtgccttat

SEQ ID NO: 18870 - DNA, 25 bp, Homo sapiens
gcactccaaggctgtgtgtgcacca

SEQ ID NO: 18871 - DNA, 25 bp, Homo sapiens
gcagagtcgaggctgtcttgtatcc

SEQ ID NO: 18872 - DNA, 25 bp, Homo sapiens
gccacagatgaactctacctttgct

SEQ ID NO: 18873 - DNA, 25 bp, Homo sapiens
gttctcttctgacaagttacccttg

SEQ ID NO: 18874 - DNA, 25 bp, Homo sapiens
tagcgttcagatgtgactggcccag

SEQ ID NO: 18875 - DNA, 25 bp, Homo sapiens
tgtgtgcaccagccagagagcgcac

SEQ ID NO: 18876 - DNA, 25 bp, Homo sapiens
aacatcgataccacctttgtttcca

SEQ ID NO: 18877 - DNA, 25 bp, Homo sapiens
cccagcattctgtacttcgggggcc

SEQ ID NO: 18878 - DNA, 25 bp, Homo sapiens
cgagcagggccactggaccctgcag

SEQ ID NO: 18879 - DNA, 25 bp, Homo sapiens
cttttctatggagccttccgagtcc

SEQ ID NO: 18880 - DNA, 25 bp, Homo sapiens
ggaactctattttcacacttttcta

SEQ ID NO: 18881 - DNA, 25 bp, Homo sapiens
ggcatggccaagttctgctggagga

SEQ ID NO: 18882 - DNA, 25 bp, Homo sapiens
ggccttctctcttgttataaaactt

SEQ ID NO: 18883 - DNA, 25 bp, Homo sapiens
gttttcagacctccattaacatccc

SEQ ID NO: 18884 - DNA, 25 bp, Homo sapiens
tcaactccagtttccaatgtctatg

SEQ ID NO: 18885 - DNA, 25 bp, Homo sapiens
ttcacttgaggctgtctgtctggat

SEQ ID NO: 18886 - DNA, 25 bp, Homo sapiens
ttgtttccattctcactggtgtaaa

SEQ ID NO: 18887 - DNA, 25 bp, Homo sapiens
aaagtagtttatgactcagccctcc

SEQ ID NO: 18888 - DNA, 25 bp, Homo sapiens
agcaacatggggctttcactgcagc

SEQ ID NO: 18889 - DNA, 25 bp, Homo sapiens
agcaggtctgttttctacctcaagt

SEQ ID NO: 18890 - DNA, 25 bp, Homo sapiens
cactccatgtctatatgtcaccttc

SEQ ID NO: 18891 - DNA, 25 bp, Homo sapiens
ctctatgaccccaaggccttgagtg

SEQ ID NO: 18892 - DNA, 25 bp, Homo sapiens
cttgacccactccatgtctatatgt

SEQ ID NO: 18893 - DNA, 25 bp, Homo sapiens
gaaggttgcaaaaggtctggaatgg

SEQ ID NO: 18894 - DNA, 25 bp, Homo sapiens
gccctgaggtccgtgaatgcatgtg

SEQ ID NO: 18895 - DNA, 25 bp, Homo sapiens
gccttgagtgaggcatccacgtccg

SEQ ID NO: 18896 - DNA, 25 bp, Homo sapiens
ggatatcagcaacatggggctttca

SEQ ID NO: 18897 - DNA, 25 bp, Homo sapiens
tgcagcagcaggtctgttttctacc

SEQ ID NO: 18898 - DNA, 25 bp, Homo sapiens
agtggaacgtgacatctttgccagt

SEQ ID NO: 18899 - DNA, 25 bp, Homo sapiens
caaagtgggccacgttagcatctgc

SEQ ID NO: 18900 - DNA, 25 bp, Homo sapiens
caatctggaggcttctgtttctgca

SEQ ID NO: 18901 - DNA, 25 bp, Homo sapiens
cccagggccagctaagagttccaaa

SEQ ID NO: 18902 - DNA, 25 bp, Homo sapiens
ctctgaattcagcctgtcaccgatg

SEQ ID NO: 18903 - DNA, 25 bp, Homo sapiens
gaaagtctgtctctgaacacaatta

SEQ ID NO: 18904 - DNA, 25 bp, Homo sapiens
gaaatggacacgtctcatctgaccc

SEQ ID NO: 18905 - DNA, 25 bp, Homo sapiens
gaccaaagggatgcacaggcggctc

SEQ ID NO: 18906 - DNA, 25 bp, Homo sapiens
gccacgagagctaggtccttgatct

SEQ ID NO: 18907 - DNA, 25 bp, Homo sapiens
gtctcaaactcgcacaattttttcc

SEQ ID NO: 18908 - DNA, 25 bp, Homo sapiens
tgtttctgcattctgccacgagagc

SEQ ID NO: 18909 - DNA, 25 bp, Homo sapiens
aagtcagcatttggggtcgggattt

SEQ ID NO: 18910 - DNA, 25 bp, Homo sapiens
ataacggctgttatttttctggcat

SEQ ID NO: 18911 - DNA, 25 bp, Homo sapiens
gcctttgtttagtagcacggttatt

SEQ ID NO: 18912 - DNA, 25 bp, Homo sapiens
gtactctgtgtgcagcagtatttgg

SEQ ID NO: 18913 - DNA, 25 bp, Homo sapiens
gtagctgccaaatgtgcctttaatt

SEQ ID NO: 18914 - DNA, 25 bp, Homo sapiens
gtgtggcttagggagagcgcacctg

SEQ ID NO: 18915 - DNA, 25 bp, Homo sapiens
tctgtcggtcggtctttgatgtaag

SEQ ID NO: 18916 - DNA, 25 bp, Homo sapiens
tgcatgccactttcagtagctgcca

SEQ ID NO: 18917 - DNA, 25 bp, Homo sapiens
tggcctttgtacctaaccatgttca

SEQ ID NO: 18918 - DNA, 25 bp, Homo sapiens
tgggtcacattggactaccactcaa

SEQ ID NO: 18919 - DNA, 25 bp, Homo sapiens
ttgggcagggaactctggggtgcaa

SEQ ID NO: 18920 - DNA, 25 bp, Homo sapiens
acattctccaaacaacatcaagcat

SEQ ID NO: 18921 - DNA, 25 bp, Homo sapiens
agaaaggttgtgctcgctacactgc

SEQ ID NO: 18922 - DNA, 25 bp, Homo sapiens
attttcacttatttaacattctcca

SEQ ID NO: 18923 - DNA, 25 bp, Homo sapiens
cacccgtatagcctcaatatttgtc

SEQ ID NO: 18924 - DNA, 25 bp, Homo sapiens
gaacattgttcggttcacacgttcc

SEQ ID NO: 18925 - DNA, 25 bp, Homo sapiens
gaactttaggtacacataacttatg

SEQ ID NO: 18926 - DNA, 25 bp, Homo sapiens
gaagacacttaaattctgacccata

SEQ ID NO: 18927 - DNA, 25 bp, Homo sapiens
gagacctcttgtattcaatctgtga

SEQ ID NO: 18928 - DNA, 25 bp, Homo sapiens
gtattaatccgtacacccgtatagc

SEQ ID NO: 18929 - DNA, 25 bp, Homo sapiens
tatggtcttttatacctagtttgta

SEQ ID NO: 18930 - DNA, 25 bp, Homo sapiens
ttttcttcccttcatgaactttagg

SEQ ID NO: 18931 - DNA, 25 bp, Homo sapiens
accgatgcttcactgtgccaaaaga

SEQ ID NO: 18932 - DNA, 25 bp, Homo sapiens
acttccattgatttatgtcccttcc

SEQ ID NO: 18933 - DNA, 25 bp, Homo sapiens
ccaggcttcgtcttatttctactgt

SEQ ID NO: 18934 - DNA, 25 bp, Homo sapiens
cccccatccgtgtacgtatgtggca

SEQ ID NO: 18935 - DNA, 25 bp, Homo sapiens
ctactgtttttgtcgcaacttccat

SEQ ID NO: 18936 - DNA, 25 bp, Homo sapiens
ctgtggtctccttgggccaagcaat

SEQ ID NO: 18937 - DNA, 25 bp, Homo sapiens
gatttcttgctattgaccgatgctt

SEQ ID NO: 18938 - DNA, 25 bp, Homo sapiens
gtacatcagggaacctttccacact

SEQ ID NO: 18939 - DNA, 25 bp, Homo sapiens
tagtggttctctaactgtggtctcc

SEQ ID NO: 18940 - DNA, 25 bp, Homo sapiens
tgccaggaccactgccttgaaagca

SEQ ID NO: 18941 - DNA, 25 bp, Homo sapiens
ttgcaggcaacgggctacagcttta

SEQ ID NO: 18942 - DNA, 25 bp, Homo sapiens
aagaccatcccaaaatgcttcaagt

SEQ ID NO: 18943 - DNA, 25 bp, Homo sapiens
acctgtggtggtctgattatcctga

SEQ ID NO: 18944 - DNA, 25 bp, Homo sapiens
acgtgagaactgctctagtttctat

SEQ ID NO: 18945 - DNA, 25 bp, Homo sapiens
agagtaactaccagccatttctcca

SEQ ID NO: 18946 - DNA, 25 bp, Homo sapiens
ctcttccacagacctcaacgtgaga

SEQ ID NO: 18947 - DNA, 25 bp, Homo sapiens
gaactgaaaacatattttgccccca

SEQ ID NO: 18948 - DNA, 25 bp, Homo sapiens
gattttcttgttttctgttacacct

SEQ ID NO: 18949 - DNA, 25 bp, Homo sapiens
gcctcagttacacatccaaactcta

SEQ ID NO: 18950 - DNA, 25 bp, Homo sapiens
gttacaccttgagtcatttgccttt

SEQ ID NO: 18951 - DNA, 25 bp, Homo sapiens
tgaaatacttcattaccccaactaa

SEQ ID NO: 18952 - DNA, 25 bp, Homo sapiens
ttctccaatggacatctcttccaca

SEQ ID NO: 18953 - DNA, 25 bp, Homo sapiens
aaacagctgaatttgtcacatttat

SEQ ID NO: 18954 - DNA, 25 bp, Homo sapiens
aaacctacagctgttcaaggaccag

SEQ ID NO: 18955 - DNA, 25 bp, Homo sapiens
aacaggattccattgacctaattat

SEQ ID NO: 18956 - DNA, 25 bp, Homo sapiens
aacgggtagactaactgcccagctt

SEQ ID NO: 18957 - DNA, 25 bp, Homo sapiens
actgcccagcttagacacttatcta

SEQ ID NO: 18958 - DNA, 25 bp, Homo sapiens
agaaagtgacaaatgctgcaaagcc

SEQ ID NO: 18959 - DNA, 25 bp, Homo sapiens
agacacttatctatgccacaaaaca

SEQ ID NO: 18960 - DNA, 25 bp, Homo sapiens
caaggaccagctgacaggtcaagtg

SEQ ID NO: 18961 - DNA, 25 bp, Homo sapiens
caggtcaagtgtggccttttctggt

SEQ ID NO: 18962 - DNA, 25 bp, Homo sapiens
cagtgagtcgaggttgcgctactgc

SEQ ID NO: 18963 - DNA, 25 bp, Homo sapiens
ggccttttctggtctttgaacacat

SEQ ID NO: 18964 - DNA, 25 bp, Homo sapiens
agaatgtacatagtccctttggcca

SEQ ID NO: 18965 - DNA, 25 bp, Homo sapiens
gaaggcggcttctgatttttagggt

SEQ ID NO: 18966 - DNA, 25 bp, Homo sapiens
gatgacacatttgtccatcgtcctg

SEQ ID NO: 18967 - DNA, 25 bp, Homo sapiens
gcgggtctccatgttatattgtgtg

SEQ ID NO: 18968 - DNA, 25 bp, Homo sapiens
gctgcctcacatagctgttttgcaa

SEQ ID NO: 18969 - DNA, 25 bp, Homo sapiens
gtgtgtttcagcttatgttcgttct

SEQ ID NO: 18970 - DNA, 25 bp, Homo sapiens
tctgctttccagaggacaccggagc

SEQ ID NO: 18971 - DNA, 25 bp, Homo sapiens
tgaggggtcgactgagctttgttga

SEQ ID NO: 18972 - DNA, 25 bp, Homo sapiens
tgaggggttcagacacccagtctcc

SEQ ID NO: 18973 - DNA, 25 bp, Homo sapiens
tgttgcatttttcactcttaacccg

SEQ ID NO: 18974 - DNA, 25 bp, Homo sapiens
ttgtgtgtttactgagcttcccact

SEQ ID NO: 18975 - DNA, 25 bp, Homo sapiens
ataacacaacccatcacctttttgt

SEQ ID NO: 18976 - DNA, 25 bp, Homo sapiens
atacaagcataacacaacccatcac

SEQ ID NO: 18977 - DNA, 25 bp, Homo sapiens
attcataaagacacagcaccagcat

SEQ ID NO: 18978 - DNA, 25 bp, Homo sapiens
caccagcatgtgatgcctccagaaa

SEQ ID NO: 18979 - DNA, 25 bp, Homo sapiens
catacattacactttttcttgcaga

SEQ ID NO: 18980 - DNA, 25 bp, Homo sapiens
gacacagctttagaacataccggag

SEQ ID NO: 18981 - DNA, 25 bp, Homo sapiens
gatgggcagatccagatctcagaca

SEQ ID NO: 18982 - DNA, 25 bp, Homo sapiens
gctcatcgatgggccattacctttg

SEQ ID NO: 18983 - DNA, 25 bp, Homo sapiens
gtcaagacagcattcaatacaagca

SEQ ID NO: 18984 - DNA, 25 bp, Homo sapiens
gtgtttttctgtagtgtcacttaaa

SEQ ID NO: 18985 - DNA, 25 bp, Homo sapiens
ttaattagccctgtcactagccaaa

SEQ ID NO: 18986 - DNA, 25 bp, Homo sapiens
aatactatgctctctacacactgtt

SEQ ID NO: 18987 - DNA, 25 bp, Homo sapiens
atgcatccgatttaaccaacatctc

SEQ ID NO: 18988 - DNA, 25 bp, Homo sapiens
cactgtatcttgggtttgttggcta

SEQ ID NO: 18989 - DNA, 25 bp, Homo sapiens
cagggtcctttctcagacattactg

SEQ ID NO: 18990 - DNA, 25 bp, Homo sapiens
ccacacaccaggcactaatcacctg

SEQ ID NO: 18991 - DNA, 25 bp, Homo sapiens
gacattactgcatgctgtatatggc

SEQ ID NO: 18992 - DNA, 25 bp, Homo sapiens
ggaaaggtgatctgcactgtatctt

SEQ ID NO: 18993 - DNA, 25 bp, Homo sapiens
ggcgttagctgtgtgttgatcttct

SEQ ID NO: 18994 - DNA, 25 bp, Homo sapiens
gttagagttctagccattttatttc

SEQ ID NO: 18995 - DNA, 25 bp, Homo sapiens
tgtaatcagctcctgcctttttatt

SEQ ID NO: 18996 - DNA, 25 bp, Homo sapiens
ttgttggctatgcttcctttgatga

SEQ ID NO: 18997 - DNA, 25 bp, Homo sapiens
cggccccatcggaactgagaattgc

SEQ ID NO: 18998 - DNA, 25 bp, Homo sapiens
cggcttctgtctggacattgcatcg

SEQ ID NO: 18999 - DNA, 25 bp, Homo sapiens
cttctgtctggacattgcatcgccc

SEQ ID NO: 19000 - DNA, 25 bp, Homo sapiens
gccccatcggaactgagaattgcaa

SEQ ID NO: 19001 - DNA, 25 bp, Homo sapiens
ggagcttctgctgcaaggaacaaaa

SEQ ID NO: 19002 - DNA, 25 bp, Homo sapiens
tagctatagttaagttgccttcccc

SEQ ID NO: 19003 - DNA, 25 bp, Homo sapiens
tattaaacgtctgtggagcttctgc

SEQ ID NO: 19004 - DNA, 25 bp, Homo sapiens
tcccggtgttgttattaaacgtctg

SEQ ID NO: 19005 - DNA, 25 bp, Homo sapiens
tgggtttttcgtctttccagattgc

SEQ ID NO: 19006 - DNA, 25 bp, Homo sapiens
tgtggagcttctgctgcaaggaaca

SEQ ID NO: 19007 - DNA, 25 bp, Homo sapiens
ttgggtttttcgtctttccagattg

SEQ ID NO: 19008 - DNA, 25 bp, Homo sapiens
aacttgtccttaacttgccatgttg

SEQ ID NO: 19009 - DNA, 25 bp, Homo sapiens
aattctctatggctttcagtcttgt

SEQ ID NO: 19010 - DNA, 25 bp, Homo sapiens
agcaccctgtaggattttgttcctt

SEQ ID NO: 19011 - DNA, 25 bp, Homo sapiens
agggggatctcatctaacttgtcct

SEQ ID NO: 19012 - DNA, 25 bp, Homo sapiens
atcccctttcaacacattgttcagg

SEQ ID NO: 19013 - DNA, 25 bp, Homo sapiens
gaatctgcccatgtggctggcaggc

SEQ ID NO: 19014 - DNA, 25 bp, Homo sapiens
gaggcttgagctgtcaattctctat

SEQ ID NO: 19015 - DNA, 25 bp, Homo sapiens
ggattggaccctgtacttgtggatg

SEQ ID NO: 19016 - DNA, 25 bp, Homo sapiens
taaagcgagttatgtcagcaccctg

SEQ ID NO: 19017 - DNA, 25 bp, Homo sapiens
tcagtcttgtggctgcgggacttgg

SEQ ID NO: 19018 - DNA, 25 bp, Homo sapiens
ttccccattgggatgcttaagccat

SEQ ID NO: 19019 - DNA, 25 bp, Homo sapiens
aaacaccgcatggatgttgattggt

SEQ ID NO: 19020 - DNA, 25 bp, Homo sapiens
aatgacgtttgccagtagttttact

SEQ ID NO: 19021 - DNA, 25 bp, Homo sapiens
agggagctcaggaatttttattact

SEQ ID NO: 19022 - DNA, 25 bp, Homo sapiens
atgatgcatttttcagtcccttttc

SEQ ID NO: 19023 - DNA, 25 bp, Homo sapiens
ctcttgttatcatcaggttcacatt

SEQ ID NO: 19024 - DNA, 25 bp, Homo sapiens
ctgctgcccctgctaatgttaagca

SEQ ID NO: 19025 - DNA, 25 bp, Homo sapiens
gaagtcccaacacctaaactggaat

SEQ ID NO: 19026 - DNA, 25 bp, Homo sapiens
gacacatttgctccttataaagtta

SEQ ID NO: 19027 - DNA, 25 bp, Homo sapiens
gatgtattctaccttggaagtccca

SEQ ID NO: 19028 - DNA, 25 bp, Homo sapiens
tggaattcttgtatttacatctcct

SEQ ID NO: 19029 - DNA, 25 bp, Homo sapiens
ttttcagtcccttttcagagcaaat

SEQ ID NO: 19030 - DNA, 25 bp, Homo sapiens
aaagccttccctaaaaagagagcat

SEQ ID NO: 19031 - DNA, 25 bp, Homo sapiens
aatatctacatggtccacacttttc

SEQ ID NO: 19032 - DNA, 25 bp, Homo sapiens
acatttccacttctgtttatcacaa

SEQ ID NO: 19033 - DNA, 25 bp, Homo sapiens
agagcatgccagtcatagagacact

SEQ ID NO: 19034 - DNA, 25 bp, Homo sapiens
atgcgtggattcttgttcatttatc

SEQ ID NO: 19035 - DNA, 25 bp, Homo sapiens
atgttataccaatgcatgtgtttga

SEQ ID NO: 19036 - DNA, 25 bp, Homo sapiens
gacactaatttggcacttttcctcc

SEQ ID NO: 19037 - DNA, 25 bp, Homo sapiens
gagtttcttaaatgcgtggattctt

SEQ ID NO: 19038 - DNA, 25 bp, Homo sapiens
gggccaacctattagggctcaagta

SEQ ID NO: 19039 - DNA, 25 bp, Homo sapiens
gtctcttttatattttggcacaatt

SEQ ID NO: 19040 - DNA, 25 bp, Homo sapiens
tttatctctgaatatgtctctttta

SEQ ID NO: 19041 - DNA, 25 bp, Homo sapiens
aggacaaactgcccagacttgagcc

SEQ ID NO: 19042 - DNA, 25 bp, Homo sapiens
cagctgggtcttcataggagccaaa

SEQ ID NO: 19043 - DNA, 25 bp, Homo sapiens
caggaaactcttctctgacttgggg

SEQ ID NO: 19044 - DNA, 25 bp, Homo sapiens
catgcccccgaagccattttagggt

SEQ ID NO: 19045 - DNA, 25 bp, Homo sapiens
cattttagggtggctgtggctcttc

SEQ ID NO: 19046 - DNA, 25 bp, Homo sapiens
gagagaatggggtgctttcgtcagg

SEQ ID NO: 19047 - DNA, 25 bp, Homo sapiens
taaaagcccctttgagcagttctta

SEQ ID NO: 19048 - DNA, 25 bp, Homo sapiens
tacccggaagaccagcctcagaggg

SEQ ID NO: 19049 - DNA, 25 bp, Homo sapiens
tctgacttggggagttcctacgcga

SEQ ID NO: 19050 - DNA, 25 bp, Homo sapiens
tctggaaccagctgtctgtggagag

SEQ ID NO: 19051 - DNA, 25 bp, Homo sapiens
tggagatggagggctgcatgccccc

SEQ ID NO: 19052 - DNA, 25 bp, Homo sapiens
aaaatggtcagagcttaccccttgg

SEQ ID NO: 19053 - DNA, 25 bp, Homo sapiens
aagggatgacaccaaacctggcagg

SEQ ID NO: 19054 - DNA, 25 bp, Homo sapiens
atgcaggttaagcttctgctgctcc

SEQ ID NO: 19055 - DNA, 25 bp, Homo sapiens
cctggcaggaacttttcacgcaatc

SEQ ID NO: 19056 - DNA, 25 bp, Homo sapiens
gagggattctcatgcaggttaagct

SEQ ID NO: 19057 - DNA, 25 bp, Homo sapiens
gcagggtcaactttctgactggtga

SEQ ID NO: 19058 - DNA, 25 bp, Homo sapiens
ggaaaactcttatccatctctcaaa

SEQ ID NO: 19059 - DNA, 25 bp, Homo sapiens
ggaacagcatgccaagcgtgagaag

SEQ ID NO: 19060 - DNA, 25 bp, Homo sapiens
tattggagcctacagttttgcccct

SEQ ID NO: 19061 - DNA, 25 bp, Homo sapiens
ttaccccttggctgtgcagggtcaa

SEQ ID NO: 19062 - DNA, 25 bp, Homo sapiens
ttctgtcccctgcaaaatggtcaga

SEQ ID NO: 19063 - DNA, 25 bp, Homo sapiens
aagaggtctcattcatttgcatgga

SEQ ID NO: 19064 - DNA, 25 bp, Homo sapiens
agaacttgtcaatcgcctttggaag

SEQ ID NO: 19065 - DNA, 25 bp, Homo sapiens
atctcatcttttgacccaatcttat

SEQ ID NO: 19066 - DNA, 25 bp, Homo sapiens
gaaacacttaataaactctcaataa

SEQ ID NO: 19067 - DNA, 25 bp, Homo sapiens
gagatttacatatgactcttgtcaa

SEQ ID NO: 19068 - DNA, 25 bp, Homo sapiens
gtcattcgatgttgctgagatttac

SEQ ID NO: 19069 - DNA, 25 bp, Homo sapiens
taacagtgaatctctgtgtgatctc

SEQ ID NO: 19070 - DNA, 25 bp, Homo sapiens
tatgtgtgtatattacttgtgtcac

SEQ ID NO: 19071 - DNA, 25 bp, Homo sapiens
tgactcttgtcaacatctcatcttt

SEQ ID NO: 19072 - DNA, 25 bp, Homo sapiens
tttactccagtcattcgatgttgct

SEQ ID NO: 19073 - DNA, 25 bp, Homo sapiens
tttgacccaatcttattcatttaat

SEQ ID NO: 19074 - DNA, 25 bp, Homo sapiens
aaagtgcctatcagcagcgttgcgt

SEQ ID NO: 19075 - DNA, 25 bp, Homo sapiens
actgcccctggaagcaaagtgccta

SEQ ID NO: 19076 - DNA, 25 bp, Homo sapiens
aggaaccggtattgcctagagcctc

SEQ ID NO: 19077 - DNA, 25 bp, Homo sapiens
atggtggagcagggggcatctttta

SEQ ID NO: 19078 - DNA, 25 bp, Homo sapiens
catggtcactacaggatggtggagc

SEQ ID NO: 19079 - DNA, 25 bp, Homo sapiens
gaatgtgccagaatgctgaaccttc

SEQ ID NO: 19080 - DNA, 25 bp, Homo sapiens
gctgaaccttcttgttaatgctatg

SEQ ID NO: 19081 - DNA, 25 bp, Homo sapiens
taatgctatgaccgtgccttgaata

SEQ ID NO: 19082 - DNA, 25 bp, Homo sapiens
tagtccactcttaggggaaccagca

SEQ ID NO: 19083 - DNA, 25 bp, Homo sapiens
tccagtgtagcctggctctgagaga

SEQ ID NO: 19084 - DNA, 25 bp, Homo sapiens
tggagaaggttccatagtccactct

SEQ ID NO: 19085 - DNA, 25 bp, Homo sapiens
aatataatgatatcctccttctagg

SEQ ID NO: 19086 - DNA, 25 bp, Homo sapiens
atttttggcttataatgctacattt

SEQ ID NO: 19087 - DNA, 25 bp, Homo sapiens
cagtattgcatgtgttcgtgtgtat

SEQ ID NO: 19088 - DNA, 25 bp, Homo sapiens
gagaagcccagttttattctgtctt

SEQ ID NO: 19089 - DNA, 25 bp, Homo sapiens
gctaggttaagctgtgctgttctac

SEQ ID NO: 19090 - DNA, 25 bp, Homo sapiens
ggttcgaggattgggagggctctga

SEQ ID NO: 19091 - DNA, 25 bp, Homo sapiens
gtgtgtatagattgtggttcgagga

SEQ ID NO: 19092 - DNA, 25 bp, Homo sapiens
tatggaaatggcttgtgctttgaga

SEQ ID NO: 19093 - DNA, 25 bp, Homo sapiens
tgtgctgttctactgatggttgttt

SEQ ID NO: 19094 - DNA, 25 bp, Homo sapiens
tgttcttctgttgtttatggtataa

SEQ ID NO: 19095 - DNA, 25 bp, Homo sapiens
ttattaatgtaccttccgttttgag

SEQ ID NO: 19096 - DNA, 25 bp, Homo sapiens
atgctctcgtacattgagtactttt

SEQ ID NO: 19097 - DNA, 25 bp, Homo sapiens
attcttttttctcatactcttcaaa

SEQ ID NO: 19098 - DNA, 25 bp, Homo sapiens
ctattctgaaattgcctacatgttt

SEQ ID NO: 19099 - DNA, 25 bp, Homo sapiens
ctggaaattttcaataaacctgtca

SEQ ID NO: 19100 - DNA, 25 bp, Homo sapiens
gaacatcccagtttgaattcatttc

SEQ ID NO: 19101 - DNA, 25 bp, Homo sapiens
gcctacatgtttcaataccagttat

SEQ ID NO: 19102 - DNA, 25 bp, Homo sapiens
gttctgcagctggttaattcatgta

SEQ ID NO: 19103 - DNA, 25 bp, Homo sapiens
taagcagtttttacggagtttacag

SEQ ID NO: 19104 - DNA, 25 bp, Homo sapiens
tttccttctgttaatcttttgtatt

SEQ ID NO: 19105 - DNA, 25 bp, Homo sapiens
tttgccaaacttagtaactctgtta

SEQ ID NO: 19106 - DNA, 25 bp, Homo sapiens
ttttgtattcacttatgctctcgta

SEQ ID NO: 19107 - DNA, 25 bp, Homo sapiens
aactgtgggcatttcttgtcttatt

SEQ ID NO: 19108 - DNA, 25 bp, Homo sapiens
aatgacaactttttgcacccatgtc

SEQ ID NO: 19109 - DNA, 25 bp, Homo sapiens
acttgttacgcattgttcaaactga

SEQ ID NO: 19110 - DNA, 25 bp, Homo sapiens
agcaatggcctgaatagaagcaacc

SEQ ID NO: 19111 - DNA, 25 bp, Homo sapiens
ccatgtcacagaatacttgttacgc

SEQ ID NO: 19112 - DNA, 25 bp, Homo sapiens
gataacctttgaaccttgaattttg

SEQ ID NO: 19113 - DNA, 25 bp, Homo sapiens
gtcaaatactgacagattcgttcta

SEQ ID NO: 19114 - DNA, 25 bp, Homo sapiens
gtttgtaattatttgctcctttgaa

SEQ ID NO: 19115 - DNA, 25 bp, Homo sapiens
tctcctgatgggtactttaatttga

SEQ ID NO: 19116 - DNA, 25 bp, Homo sapiens
tctttccagagaacgtggttttcat

SEQ ID NO: 19117 - DNA, 25 bp, Homo sapiens
tggagatgtattcccaacagcagaa

SEQ ID NO: 19118 - DNA, 25 bp, Homo sapiens
aaacctgggtgtcctgtccagaaag

SEQ ID NO: 19119 - DNA, 25 bp, Homo sapiens
aagctccctcactttattgttgaga

SEQ ID NO: 19120 - DNA, 25 bp, Homo sapiens
aatggggtttggatttctgcttagg

SEQ ID NO: 19121 - DNA, 25 bp, Homo sapiens
accaacaggcccttatctggtggtt

SEQ ID NO: 19122 - DNA, 25 bp, Homo sapiens
atttgcccaaagtcagtcagctggg

SEQ ID NO: 19123 - DNA, 25 bp, Homo sapiens
ctttctgctctgtagcaaggcagca

SEQ ID NO: 19124 - DNA, 25 bp, Homo sapiens
gaaatcggagcaaagctccctcact

SEQ ID NO: 19125 - DNA, 25 bp, Homo sapiens
gaagttctatctgacaagtttaggc

SEQ ID NO: 19126 - DNA, 25 bp, Homo sapiens
ggcccttatctggtggttggatcat

SEQ ID NO: 19127 - DNA, 25 bp, Homo sapiens
gtccttgaagtaagatgcctcatct

SEQ ID NO: 19128 - DNA, 25 bp, Homo sapiens
taggcaaagtctcctgcagttcatc

SEQ ID NO: 19129 - DNA, 25 bp, Homo sapiens
agaaggggacctgctattcttcgag

SEQ ID NO: 19130 - DNA, 25 bp, Homo sapiens
cagggacccttcagcacaggtcctg

SEQ ID NO: 19131 - DNA, 25 bp, Homo sapiens
ccccatgtccctgtggagaagtgtg

SEQ ID NO: 19132 - DNA, 25 bp, Homo sapiens
ctctgtatgctaaagctttctctcc

SEQ ID NO: 19133 - DNA, 25 bp, Homo sapiens
gagctacagccagggatagagcaga

SEQ ID NO: 19134 - DNA, 25 bp, Homo sapiens
gagtgcattccagaaggggacctgc

SEQ ID NO: 19135 - DNA, 25 bp, Homo sapiens
gataagaagctgctctgtatgctaa

SEQ ID NO: 19136 - DNA, 25 bp, Homo sapiens
gcaggggtatgaaggcagcccaagg

SEQ ID NO: 19137 - DNA, 25 bp, Homo sapiens
gctattcttcgaggcagtggaccct

SEQ ID NO: 19138 - DNA, 25 bp, Homo sapiens
ttcctttcccagatcttcaatattt

SEQ ID NO: 19139 - DNA, 25 bp, Homo sapiens
tttgctgatggtcaacactctggcc

SEQ ID NO: 19140 - DNA, 25 bp, Homo sapiens
aagcatttcccagggacactacaca

SEQ ID NO: 19141 - DNA, 25 bp, Homo sapiens
atcattgtctgtaattactcctata

SEQ ID NO: 19142 - DNA, 25 bp, Homo sapiens
ccgttttgactgcttggtatctcat

SEQ ID NO: 19143 - DNA, 25 bp, Homo sapiens
gataacttaggcttttgcactattt

SEQ ID NO: 19144 - DNA, 25 bp, Homo sapiens
gatcactacatcttttggataactt

SEQ ID NO: 19145 - DNA, 25 bp, Homo sapiens
gcctcaaacttttctatcattgtct

SEQ ID NO: 19146 - DNA, 25 bp, Homo sapiens
gggacactacacagtctttataatt

SEQ ID NO: 19147 - DNA, 25 bp, Homo sapiens
ggtatctcattgtaagcatttccca

SEQ ID NO: 19148 - DNA, 25 bp, Homo sapiens
ggttagattccgttttgactgcttg

SEQ ID NO: 19149 - DNA, 25 bp, Homo sapiens
gtaattactcctataatcttttatt

SEQ ID NO: 19150 - DNA, 25 bp, Homo sapiens
tgcactattttgtcacgatgcctca

SEQ ID NO: 19151 - DNA, 25 bp, Homo sapiens
aaacagtcgcaataccagaacacca

SEQ ID NO: 19152 - DNA, 25 bp, Homo sapiens
aatatctcaagatttctaggcattt

SEQ ID NO: 19153 - DNA, 25 bp, Homo sapiens
acctttgtaactactgtacaggtgc

SEQ ID NO: 19154 - DNA, 25 bp, Homo sapiens
ccagaacaccattgtagtcgtttgt

SEQ ID NO: 19155 - DNA, 25 bp, Homo sapiens
gagacaagctttgtaatacctttgt

SEQ ID NO: 19156 - DNA, 25 bp, Homo sapiens
gtacaggtgcgtggttagattccgt

SEQ ID NO: 19157 - DNA, 25 bp, Homo sapiens
gtctaatagtaggatgttctctctg

SEQ ID NO: 19158 - DNA, 25 bp, Homo sapiens
gtgacttctttactgtgttcatgca

SEQ ID NO: 19159 - DNA, 25 bp, Homo sapiens
gtgtagactgtgtatcattagcaaa

SEQ ID NO: 19160 - DNA, 25 bp, Homo sapiens
tactgtgttcatgcagagacaagct

SEQ ID NO: 19161 - DNA, 25 bp, Homo sapiens
ttctaggcattttcctatgtctaat

SEQ ID NO: 19162 - DNA, 25 bp, Homo sapiens
aaggaaaagtcatctctctccttcc

SEQ ID NO: 19163 - DNA, 25 bp, Homo sapiens
cagatatcaagggcgccgacctgaa

SEQ ID NO: 19164 - DNA, 25 bp, Homo sapiens
cagttctttgtctatcttcaggaag

SEQ ID NO: 19165 - DNA, 25 bp, Homo sapiens
cccctagcagagcagaacccagaca

SEQ ID NO: 19166 - DNA, 25 bp, Homo sapiens
cctgggcgaacctgaagcaagcacc

SEQ ID NO: 19167 - DNA, 25 bp, Homo sapiens
cgatgtgggtatggaaccccctctg

SEQ ID NO: 19168 - DNA, 25 bp, Homo sapiens
gattctggagacattggctggtaac

SEQ ID NO: 19169 - DNA, 25 bp, Homo sapiens
ggagatagctgcctgctagatagcc

SEQ ID NO: 19170 - DNA, 25 bp, Homo sapiens
ggcgcaacctatatcctggtgatgg

SEQ ID NO: 19171 - DNA, 25 bp, Homo sapiens
tgatggtggatccagatgcccctag

SEQ ID NO: 19172 - DNA, 25 bp, Homo sapiens
tggagccgatagtcaagttcccggg

SEQ ID NO: 19173 - DNA, 25 bp, Homo sapiens
accccacttctgtatacataaacgg

SEQ ID NO: 19174 - DNA, 25 bp, Homo sapiens
acctcgagctgaacgacgtcatcgg

SEQ ID NO: 19175 - DNA, 25 bp, Homo sapiens
acttctgtatacataaacggccaag

SEQ ID NO: 19176 - DNA, 25 bp, Homo sapiens
cccacttctgtatacataaacggcc

SEQ ID NO: 19177 - DNA, 25 bp, Homo sapiens
cctcgagctgaacgacgtcatcggc

SEQ ID NO: 19178 - DNA, 25 bp, Homo sapiens
cggtgctgggcgtcatggacgcggc

SEQ ID NO: 19179 - DNA, 25 bp, Homo sapiens
ctcgagctgaacgacgtcatcggcc

SEQ ID NO: 19180 - DNA, 25 bp, Homo sapiens
gcaccccacttctgtatacataaac

SEQ ID NO: 19181 - DNA, 25 bp, Homo sapiens
tctgtatacataaacggccaaggtg

SEQ ID NO: 19182 - DNA, 25 bp, Homo sapiens
tggacgcggtgctgggcgtcatgga

SEQ ID NO: 19183 - DNA, 25 bp, Homo sapiens
tgtatacataaacggccaaggtgtg

SEQ ID NO: 19184 - DNA, 25 bp, Homo sapiens
aaaagcggcccagtgttgattcttc

SEQ ID NO: 19185 - DNA, 25 bp, Homo sapiens
acacgcccagtgaggccgaacagag

SEQ ID NO: 19186 - DNA, 25 bp, Homo sapiens
acccctcctgtaacgactggaagca

SEQ ID NO: 19187 - DNA, 25 bp, Homo sapiens
agcaccaggctaagaacctgacccc

SEQ ID NO: 19188 - DNA, 25 bp, Homo sapiens
atccaactttgggggcaggtgtaca

SEQ ID NO: 19189 - DNA, 25 bp, Homo sapiens
gacccctcggacttgaagaatggcc

SEQ ID NO: 19190 - DNA, 25 bp, Homo sapiens
gcaattcagcgatctgtgggtccgc

SEQ ID NO: 19191 - DNA, 25 bp, Homo sapiens
gccttgttgggcccaatccagaaga

SEQ ID NO: 19192 - DNA, 25 bp, Homo sapiens
ggagagtgacatagtcccgcaactc

SEQ ID NO: 19193 - DNA, 25 bp, Homo sapiens
ggtgctggctttccaaacagagaca

SEQ ID NO: 19194 - DNA, 25 bp, Homo sapiens
tcctgtactccacattctggtctag

SEQ ID NO: 19195 - DNA, 25 bp, Homo sapiens
aacgtgcatttttcacagttacaca

SEQ ID NO: 19196 - DNA, 25 bp, Homo sapiens
aatgccagtttgcagttgtgactat

SEQ ID NO: 19197 - DNA, 25 bp, Homo sapiens
aatgttaatgtttactgccagcctt

SEQ ID NO: 19198 - DNA, 25 bp, Homo sapiens
aggcctgtattaattttgcaagcta

SEQ ID NO: 19199 - DNA, 25 bp, Homo sapiens
cagtgtgaccttttctgaggtgggc

SEQ ID NO: 19200 - DNA, 25 bp, Homo sapiens
gaagtggctcttgattgtttggaca

SEQ ID NO: 19201 - DNA, 25 bp, Homo sapiens
gaatcaggctgggtctagaagagtt

SEQ ID NO: 19202 - DNA, 25 bp, Homo sapiens
gacaaggttcatacagtgcatacag

SEQ ID NO: 19203 - DNA, 25 bp, Homo sapiens
gagttatcagactgtaggcctgtat

SEQ ID NO: 19204 - DNA, 25 bp, Homo sapiens
gccagccttgcatagcaatgccagt

SEQ ID NO: 19205 - DNA, 25 bp, Homo sapiens
ggagggttgctacgttgtgttgatt

SEQ ID NO: 19206 - DNA, 25 bp, Homo sapiens
aacccgatcttaatttccagctact

SEQ ID NO: 19207 - DNA, 25 bp, Homo sapiens
aatccaactttgcatagacatcctc

SEQ ID NO: 19208 - DNA, 25 bp, Homo sapiens
agacatcctcagaatcgcaatcagt

SEQ ID NO: 19209 - DNA, 25 bp, Homo sapiens
cacacaccatagtacacacgaaaat

SEQ ID NO: 19210 - DNA, 25 bp, Homo sapiens
cagtcccagttcagatgtgcaatac

SEQ ID NO: 19211 - DNA, 25 bp, Homo sapiens
ccagactcccctttgatacagtagg

SEQ ID NO: 19212 - DNA, 25 bp, Homo sapiens
ctggcagaaaaggaacccgatctta

SEQ ID NO: 19213 - DNA, 25 bp, Homo sapiens
gatcttaatttccagctactcctgg

SEQ ID NO: 19214 - DNA, 25 bp, Homo sapiens
gcaatcagtcatggggttgcccttc

SEQ ID NO: 19215 - DNA, 25 bp, Homo sapiens
ggcatcagtgttaacagtcccagtt

SEQ ID NO: 19216 - DNA, 25 bp, Homo sapiens
tttttttccacaaatatcagcagac

SEQ ID NO: 19217 - DNA, 25 bp, Homo sapiens
aaaatggctttctgctgtagggtct

SEQ ID NO: 19218 - DNA, 25 bp, Homo sapiens
acgcatctaatattccagtaaaccc

SEQ ID NO: 19219 - DNA, 25 bp, Homo sapiens
acggtttgtccgtggatatgggcgt

SEQ ID NO: 19220 - DNA, 25 bp, Homo sapiens
cccagtgtaactcagaaacgcatct

SEQ ID NO: 19221 - DNA, 25 bp, Homo sapiens
cggctctccatcagttgtgaacatc

SEQ ID NO: 19222 - DNA, 25 bp, Homo sapiens
gctgtttctggagtatagggtcgca

SEQ ID NO: 19223 - DNA, 25 bp, Homo sapiens
gggcgtcatcaattccattgtattc

SEQ ID NO: 19224 - DNA, 25 bp, Homo sapiens
ggtcgcatactcataaacccagtgt

SEQ ID NO: 19225 - DNA, 25 bp, Homo sapiens
ggtttatcccaagtcactaagcata

SEQ ID NO: 19226 - DNA, 25 bp, Homo sapiens
tgtgaacatctattggtttatccca

SEQ ID NO: 19227 - DNA, 25 bp, Homo sapiens
ttttccttctacagctgtttctgga

SEQ ID NO: 19228 - DNA, 25 bp, Homo sapiens
agcgctatcagtttctaaatgcatt

SEQ ID NO: 19229 - DNA, 25 bp, Homo sapiens
agtactcttcagtttgttccaagaa

SEQ ID NO: 19230 - DNA, 25 bp, Homo sapiens
atgggatcttttaagtactcttcag

SEQ ID NO: 19231 - DNA, 25 bp, Homo sapiens
gaagcatgaaagttctggcaggtta

SEQ ID NO: 19232 - DNA, 25 bp, Homo sapiens
gactgctaattgtttcatctgaaag

SEQ ID NO: 19233 - DNA, 25 bp, Homo sapiens
gcattaattactaactgccctctcc

SEQ ID NO: 19234 - DNA, 25 bp, Homo sapiens
gccctctcccaagattcatttagtt

SEQ ID NO: 19235 - DNA, 25 bp, Homo sapiens
ggcaggttatgagcagcactaggga

SEQ ID NO: 19236 - DNA, 25 bp, Homo sapiens
gttcaaacagtatccgtaaactagg

SEQ ID NO: 19237 - DNA, 25 bp, Homo sapiens
ttgttccaagaaatgtgcctactga

SEQ ID NO: 19238 - DNA, 25 bp, Homo sapiens
tttcaacaaagcccttgtctaaaat

SEQ ID NO: 19239 - DNA, 25 bp, Homo sapiens
aatgtccacatttgaaacctcccaa

SEQ ID NO: 19240 - DNA, 25 bp, Homo sapiens
caaccttcagagttcatgaggcccc

SEQ ID NO: 19241 - DNA, 25 bp, Homo sapiens
ccccttgaatgtccacagagttcat

SEQ ID NO: 19242 - DNA, 25 bp, Homo sapiens
cccggccaggatggaacgttccaga

SEQ ID NO: 19243 - DNA, 25 bp, Homo sapiens
cttccaagctcaaccttcagagttc

SEQ ID NO: 19244 - DNA, 25 bp, Homo sapiens
gaaaaatcagcgtttgtacccactc

SEQ ID NO: 19245 - DNA, 25 bp, Homo sapiens
ggggctgaggtcctctgagaaggga

SEQ ID NO: 19246 - DNA, 25 bp, Homo sapiens
tgcccagaatgtccacagagttcat

SEQ ID NO: 19247 - DNA, 25 bp, Homo sapiens
aaaggtctcccactgagacgctgtt

SEQ ID NO: 19248 - DNA, 25 bp, Homo sapiens
aacgctttcgtatatttttcctgct

SEQ ID NO: 19249 - DNA, 25 bp, Homo sapiens
aagactgcctctaaaatgtccatga

SEQ ID NO: 19250 - DNA, 25 bp, Homo sapiens
aagccattgtccagtagagctgtta

SEQ ID NO: 19251 - DNA, 25 bp, Homo sapiens
cctgtgcccacagcagacttaagac

SEQ ID NO: 19252 - DNA, 25 bp, Homo sapiens
ctcactgtgaggctgagctcagcgc

SEQ ID NO: 19253 - DNA, 25 bp, Homo sapiens
gaaagggttccatttaggcatttgc

SEQ ID NO: 19254 - DNA, 25 bp, Homo sapiens
gaaatcatatccgacatgcctgtgc

SEQ ID NO: 19255 - DNA, 25 bp, Homo sapiens
gaagagagcacctgttcatctcggc

SEQ ID NO: 19256 - DNA, 25 bp, Homo sapiens
gagagggcatccctgcagggaaatc

SEQ ID NO: 19257 - DNA, 25 bp, Homo sapiens
ggccgtgaagctaaaggtctcccac

SEQ ID NO: 19258 - DNA, 25 bp, Homo sapiens
aaagctgctcttgttagcactttga

SEQ ID NO: 19259 - DNA, 25 bp, Homo sapiens
agccctatgctgagcttgtagcctt

SEQ ID NO: 19260 - DNA, 25 bp, Homo sapiens
caaccaagtaccctgctaaatccgg

SEQ ID NO: 19261 - DNA, 25 bp, Homo sapiens
cgccatgtgtttgcaccagcttaaa

SEQ ID NO: 19262 - DNA, 25 bp, Homo sapiens
gcaaactccttccagctgaaatcaa

SEQ ID NO: 19263 - DNA, 25 bp, Homo sapiens
gcacacttgctcatttttacttcaa

SEQ ID NO: 19264 - DNA, 25 bp, Homo sapiens
gcgccctgtccagaaccaaaaagaa

SEQ ID NO: 19265 - DNA, 25 bp, Homo sapiens
ggacagccaccagtaggcttggcag

SEQ ID NO: 19266 - DNA, 25 bp, Homo sapiens
ggcttggcagtgggctgcagtggaa

SEQ ID NO: 19267 - DNA, 25 bp, Homo sapiens
taaggctgtgggcacacttgctcat

SEQ ID NO: 19268 - DNA, 25 bp, Homo sapiens
ttgtagccttttagctccacagagc

SEQ ID NO: 19269 - DNA, 25 bp, Homo sapiens
agattcggctctgtattatttgaat

SEQ ID NO: 19270 - DNA, 25 bp, Homo sapiens
atagcttttgttcgatcccaacttt

SEQ ID NO: 19271 - DNA, 25 bp, Homo sapiens
gaactaatatcatccttataacagg

SEQ ID NO: 19272 - DNA, 25 bp, Homo sapiens
gaatcagtctgccgagaatccatgt

SEQ ID NO: 19273 - DNA, 25 bp, Homo sapiens
gcgaaccatctctgtggtcttgttt

SEQ ID NO: 19274 - DNA, 25 bp, Homo sapiens
ggagaggcttcttgctgaattttga

SEQ ID NO: 19275 - DNA, 25 bp, Homo sapiens
gtttttactccattatgcacagttt

SEQ ID NO: 19276 - DNA, 25 bp, Homo sapiens
taacaggtacattttcaacttaagt

SEQ ID NO: 19277 - DNA, 25 bp, Homo sapiens
tgaattttgattctgcagctgaaat

SEQ ID NO: 19278 - DNA, 25 bp, Homo sapiens
tggccatgcaggttgacaccgttgg

SEQ ID NO: 19279 - DNA, 25 bp, Homo sapiens
ttagaataagtactggcgaaccatc

SEQ ID NO: 19280 - DNA, 25 bp, Homo sapiens
aactgaaaatcacactcctttatat

SEQ ID NO: 19281 - DNA, 25 bp, Homo sapiens
acaggtctctgtaagcaagcttgca

SEQ ID NO: 19282 - DNA, 25 bp, Homo sapiens
cccattcaccaggagccttgaagca

SEQ ID NO: 19283 - DNA, 25 bp, Homo sapiens
gagtcagtataccattttacctata

SEQ ID NO: 19284 - DNA, 25 bp, Homo sapiens
gccttgaagcattttgtttactcca

SEQ ID NO: 19285 - DNA, 25 bp, Homo sapiens
gtttactccaaaggccttgtcaagg

SEQ ID NO: 19286 - DNA, 25 bp, Homo sapiens
tactactatctcccactctagataa

SEQ ID NO: 19287 - DNA, 25 bp, Homo sapiens
tataaacagttcccctactactatc

SEQ ID NO: 19288 - DNA, 25 bp, Homo sapiens
tattcaatatgcttttcccgctttt

SEQ ID NO: 19289 - DNA, 25 bp, Homo sapiens
tgcaaaattcatccttgcaacccca

SEQ ID NO: 19290 - DNA, 25 bp, Homo sapiens
tgcttttcccgcttttctaagagga

SEQ ID NO: 19291 - DNA, 25 bp, Homo sapiens
agcagagctagcgctactcagtaaa

SEQ ID NO: 19292 - DNA, 25 bp, Homo sapiens
atgaagagcggcgcacgagtgggac

SEQ ID NO: 19293 - DNA, 25 bp, Homo sapiens
catgcgcaccgggtagcagagctag

SEQ ID NO: 19294 - DNA, 25 bp, Homo sapiens
cccaggtgatgcgcatgcgcaccgg

SEQ ID NO: 19295 - DNA, 25 bp, Homo sapiens
cgacgttttcttgggggcgtatgtg

SEQ ID NO: 19296 - DNA, 25 bp, Homo sapiens
cgctactcagtaaaaatccaatatt

SEQ ID NO: 19297 - DNA, 25 bp, Homo sapiens
gagctagcgctactcagtaaaaatc

SEQ ID NO: 19298 - DNA, 25 bp, Homo sapiens
gggacatgaagagcggcgcacgagt

SEQ ID NO: 19299 - DNA, 25 bp, Homo sapiens
tccagtacctgtgtggatcctcggc

SEQ ID NO: 19300 - DNA, 25 bp, Homo sapiens
tgatgcgcatgcgcaccgggtagca

SEQ ID NO: 19301 - DNA, 25 bp, Homo sapiens
tttcttgggggcgtatgtgaccgtc

SEQ ID NO: 19302 - DNA, 25 bp, Homo sapiens
aaacccggcagaagctcaacgtgtc

SEQ ID NO: 19303 - DNA, 25 bp, Homo sapiens
gaagaaacccggcagaagctcaacg

SEQ ID NO: 19304 - DNA, 25 bp, Homo sapiens
gcaccgtggaagctctggaagaggg

SEQ ID NO: 19305 - DNA, 25 bp, Homo sapiens
gccagcaccgtggaagctctggaag

SEQ ID NO: 19306 - DNA, 25 bp, Homo sapiens
gctcaacgtgtctacgaagctgcgc

SEQ ID NO: 19307 - DNA, 25 bp, Homo sapiens
ggagctgcttcaagaagaaacccgg

SEQ ID NO: 19308 - DNA, 25 bp, Homo sapiens
ggaggagcggaacagcctgcaagac

SEQ ID NO: 19309 - DNA, 25 bp, Homo sapiens
ggcagaagctcaacgtgtctacgaa

SEQ ID NO: 19310 - DNA, 25 bp, Homo sapiens
gtctacgaagctgcgccagctggag

SEQ ID NO: 19311 - DNA, 25 bp, Homo sapiens
tttgccagcaccgtggaagctctgg

SEQ ID NO: 19312 - DNA, 25 bp, Homo sapiens
aaaataggtaaccaggcgtctcaca

SEQ ID NO: 19313 - DNA, 25 bp, Homo sapiens
agccgaatttaactggcactttatt

SEQ ID NO: 19314 - DNA, 25 bp, Homo sapiens
atacgtagtcagtttcgatttgtta

SEQ ID NO: 19315 - DNA, 25 bp, Homo sapiens
catccagtgttcccgatttactaaa

SEQ ID NO: 19316 - DNA, 25 bp, Homo sapiens
cgtcctgtcaagagcgctaatgaac

SEQ ID NO: 19317 - DNA, 25 bp, Homo sapiens
cttctcgccgtcttgcagttgaaga

SEQ ID NO: 19318 - DNA, 25 bp, Homo sapiens
gaacgttctcattaacacgcaggag

SEQ ID NO: 19319 - DNA, 25 bp, Homo sapiens
gaactcgagattcacctttcgtttc

SEQ ID NO: 19320 - DNA, 25 bp, Homo sapiens
gcactttattttacttctaaccttg

SEQ ID NO: 19321 - DNA, 25 bp, Homo sapiens
taaccttgtttcctgacggtgtaca

SEQ ID NO: 19322 - DNA, 25 bp, Homo sapiens
tgctatgacctttccgcagtttact

SEQ ID NO: 19323 - DNA, 25 bp, Homo sapiens
aaaacaatctcgtgtgcccttgagg

SEQ ID NO: 19324 - DNA, 25 bp, Homo sapiens
aaaagcgtaatatctggagtgttct

SEQ ID NO: 19325 - DNA, 25 bp, Homo sapiens
aattttcctgtgtgtctagtcaagc

SEQ ID NO: 19326 - DNA, 25 bp, Homo sapiens
acagaatgtgataggccagcctggt

SEQ ID NO: 19327 - DNA, 25 bp, Homo sapiens
gaagggatacagattctcagtaact

SEQ ID NO: 19328 - DNA, 25 bp, Homo sapiens
ggagtgttctatttcatggaccaaa

SEQ ID NO: 19329 - DNA, 25 bp, Homo sapiens
gtcaggcattaccaaatggcacaga

SEQ ID NO: 19330 - DNA, 25 bp, Homo sapiens
gtcctttctctactggttgatatgc

SEQ ID NO: 19331 - DNA, 25 bp, Homo sapiens
gtgcccttgaggggaaagtccttga

SEQ ID NO: 19332 - DNA, 25 bp, Homo sapiens
tagggcgagaagggcccctttgtgc

SEQ ID NO: 19333 - DNA, 25 bp, Homo sapiens
tccatattaattaccccaatctttc

SEQ ID NO: 19334 - DNA, 25 bp, Homo sapiens
aatagaccttccaggcagaaccgca

SEQ ID NO: 19335 - DNA, 25 bp, Homo sapiens
aatggtcccattggagagtctccta

SEQ ID NO: 19336 - DNA, 25 bp, Homo sapiens
aggcagaaccgcaagctcaaaatct

SEQ ID NO: 19337 - DNA, 25 bp, Homo sapiens
atatggttcatatggctctatgggg

SEQ ID NO: 19338 - DNA, 25 bp, Homo sapiens
gagagtctcctaaatagaccttcca

SEQ ID NO: 19339 - DNA, 25 bp, Homo sapiens
gagtagggtatcagggtgtcttttc

SEQ ID NO: 19340 - DNA, 25 bp, Homo sapiens
gtcagctgtaagactctggaggcaa

SEQ ID NO: 19341 - DNA, 25 bp, Homo sapiens
gtttggaagcctttctggtggtggt

SEQ ID NO: 19342 - DNA, 25 bp, Homo sapiens
taagctttgtgcatctgtatttgag

SEQ ID NO: 19343 - DNA, 25 bp, Homo sapiens
tacaagcctacagtatttgcactaa

SEQ ID NO: 19344 - DNA, 25 bp, Homo sapiens
tttccactttcagttgagtagcatt

SEQ ID NO: 19345 - DNA, 25 bp, Homo sapiens
aaatgataatcaccttagtcccaaa

SEQ ID NO: 19346 - DNA, 25 bp, Homo sapiens
aataggacatgtcttccttggagct

SEQ ID NO: 19347 - DNA, 25 bp, Homo sapiens
atcacaatgccctcaacttgtattt

SEQ ID NO: 19348 - DNA, 25 bp, Homo sapiens
atcagttctttgcaatctgcctgtg

SEQ ID NO: 19349 - DNA, 25 bp, Homo sapiens
atctgcctgtggttatcagcactta

SEQ ID NO: 19350 - DNA, 25 bp, Homo sapiens
cttccttggagctgtgggcattagt

SEQ ID NO: 19351 - DNA, 25 bp, Homo sapiens
gagctgtgggcattagttcagaagc

SEQ ID NO: 19352 - DNA, 25 bp, Homo sapiens
gcctttgatcctaaaattctctact

SEQ ID NO: 19353 - DNA, 25 bp, Homo sapiens
tacgcatatatcctactcagtatca

SEQ ID NO: 19354 - DNA, 25 bp, Homo sapiens
tactcagtatcattggccttttatc

SEQ ID NO: 19355 - DNA, 25 bp, Homo sapiens
tgttacctttcagttacatgccttt

SEQ ID NO: 19356 - DNA, 25 bp, Homo sapiens
aaccagatgggcagtgcatcctgtg

SEQ ID NO: 19357 - DNA, 25 bp, Homo sapiens
agtgtacaactgggtgcgtcttgga

SEQ ID NO: 19358 - DNA, 25 bp, Homo sapiens
caactgggtgcgtcttggaactttt

SEQ ID NO: 19359 - DNA, 25 bp, Homo sapiens
cagtcagagtggacaaacctctgtg

SEQ ID NO: 19360 - DNA, 25 bp, Homo sapiens
gacaaacctctgtgggaggctctac

SEQ ID NO: 19361 - DNA, 25 bp, Homo sapiens
gccaccaaccagatgggcagtgcat

SEQ ID NO: 19362 - DNA, 25 bp, Homo sapiens
ggaggctctactgcactgagatgca

SEQ ID NO: 19363 - DNA, 25 bp, Homo sapiens
ggggctcctaagccagtgtacaact

SEQ ID NO: 19364 - DNA, 25 bp, Homo sapiens
gtacaactgggtgcgtcttggaact

SEQ ID NO: 19365 - DNA, 25 bp, Homo sapiens
tctgtgggaggctctactgcactga

SEQ ID NO: 19366 - DNA, 25 bp, Homo sapiens
tgcactgagatgcagctcttccgag

SEQ ID NO: 19367 - DNA, 25 bp, Homo sapiens
aattgcatctgttactacttagttt

SEQ ID NO: 19368 - DNA, 25 bp, Homo sapiens
actgcctagttaatgccagtggcct

SEQ ID NO: 19369 - DNA, 25 bp, Homo sapiens
atcttgacatcttggcaactgccta

SEQ ID NO: 19370 - DNA, 25 bp, Homo sapiens
attgcaggcatcttgacatcttggc

SEQ ID NO: 19371 - DNA, 25 bp, Homo sapiens
ccagtggcctgtaccatattatgga

SEQ ID NO: 19372 - DNA, 25 bp, Homo sapiens
gatttctcgatctcgttagattgca

SEQ ID NO: 19373 - DNA, 25 bp, Homo sapiens
ggaactgtcgcaaagctttccactg

SEQ ID NO: 19374 - DNA, 25 bp, Homo sapiens
gtgcatcgctaaagagagccccaac

SEQ ID NO: 19375 - DNA, 25 bp, Homo sapiens
gtgctgcaaagttgtgtgcatcgct

SEQ ID NO: 19376 - DNA, 25 bp, Homo sapiens
taaagagagccccaacctatacaga

SEQ ID NO: 19377 - DNA, 25 bp, Homo sapiens
ttccactgaaacacaggtcaccctg

SEQ ID NO: 19378 - DNA, 25 bp, Homo sapiens
caatttctgcgttctgacacatatt

SEQ ID NO: 19379 - DNA, 25 bp, Homo sapiens
cagggaaacaccacctgtcattctg

SEQ ID NO: 19380 - DNA, 25 bp, Homo sapiens
ctcatcctccactagcactaaattt

SEQ ID NO: 19381 - DNA, 25 bp, Homo sapiens
gcaagagctgaggtgccaataccaa

SEQ ID NO: 19382 - DNA, 25 bp, Homo sapiens
gtttactctgtgggtttggttcatt

SEQ ID NO: 19383 - DNA, 25 bp, Homo sapiens
tagctcttcaatctttacatgccgc

SEQ ID NO: 19384 - DNA, 25 bp, Homo sapiens
tctcctgaaaccccatcatgtaatg

SEQ ID NO: 19385 - DNA, 25 bp, Homo sapiens
tgttgcagtacctttctagacctac

SEQ ID NO: 19386 - DNA, 25 bp, Homo sapiens
ttacatgccgcaagacttttttgat

SEQ ID NO: 19387 - DNA, 25 bp, Homo sapiens
ttctccatagctcttcaatctttac

SEQ ID NO: 19388 - DNA, 25 bp, Homo sapiens
tttttgatagctcgtactcatccca

SEQ ID NO: 19389 - DNA, 25 bp, Homo sapiens
aaggtcatttacttgtacgagacag

SEQ ID NO: 19390 - DNA, 25 bp, Homo sapiens
actgttgaatttggctttacgggtg

SEQ ID NO: 19391 - DNA, 25 bp, Homo sapiens
agtataactctaactgatgttccac

SEQ ID NO: 19392 - DNA, 25 bp, Homo sapiens
atcagtatctgagaccccaaactct

SEQ ID NO: 19393 - DNA, 25 bp, Homo sapiens
caaactctccaaatactgatggtgc

SEQ ID NO: 19394 - DNA, 25 bp, Homo sapiens
ctgatggtgcattttattcttgaag

SEQ ID NO: 19395 - DNA, 25 bp, Homo sapiens
ggttttcctgaaatcctcaattcat

SEQ ID NO: 19396 - DNA, 25 bp, Homo sapiens
tgtattgttagccatcttgaagtga

SEQ ID NO: 19397 - DNA, 25 bp, Homo sapiens
ttgtaagttgagggccaggggtagg

SEQ ID NO: 19398 - DNA, 25 bp, Homo sapiens
tttctctctatttgtattgttagcc

SEQ ID NO: 19399 - DNA, 25 bp, Homo sapiens
ttttcatatgcttcaaactaacaca

SEQ ID NO: 19400 - DNA, 25 bp, Homo sapiens
agagaggatcctggcaactagtccc

SEQ ID NO: 19401 - DNA, 25 bp, Homo sapiens
atgagaaagcagttttccccaccaa

SEQ ID NO: 19402 - DNA, 25 bp, Homo sapiens
ccacctgactaggcctttagctgaa

SEQ ID NO: 19403 - DNA, 25 bp, Homo sapiens
ccaggtcaaaccctcttgtttatgt

SEQ ID NO: 19404 - DNA, 25 bp, Homo sapiens
ctgcctcagaggctgccaggtcaaa

SEQ ID NO: 19405 - DNA, 25 bp, Homo sapiens
gagagctacgtttgggcagttctgc

SEQ ID NO: 19406 - DNA, 25 bp, Homo sapiens
gagtgcacattggacctcaaggcga

SEQ ID NO: 19407 - DNA, 25 bp, Homo sapiens
taacccttcccctcatgagaaagca

SEQ ID NO: 19408 - DNA, 25 bp, Homo sapiens
tcccgcatgaggccacaggactgag

SEQ ID NO: 19409 - DNA, 25 bp, Homo sapiens
tctctatgaaatctaacccttcccc

SEQ ID NO: 19410 - DNA, 25 bp, Homo sapiens
tgatgccaccattcctaggagaggc

SEQ ID NO: 19411 - DNA, 25 bp, Homo sapiens
aagatgcttctaaacccatcacctg

SEQ ID NO: 19412 - DNA, 25 bp, Homo sapiens
aatacgctattgttgccggaggtgg

SEQ ID NO: 19413 - DNA, 25 bp, Homo sapiens
acctgctgtcttcactcaaatgatt

SEQ ID NO: 19414 - DNA, 25 bp, Homo sapiens
atggttgtgctgtcgaggacctggt

SEQ ID NO: 19415 - DNA, 25 bp, Homo sapiens
gacagtccattctttatatacacgt

SEQ ID NO: 19416 - DNA, 25 bp, Homo sapiens
gagagtgcgtggcaatccttactcc

SEQ ID NO: 19417 - DNA, 25 bp, Homo sapiens
ggatcaagttgttccactggtgtct

SEQ ID NO: 19418 - DNA, 25 bp, Homo sapiens
gggatttctagacacatcctgctgt

SEQ ID NO: 19419 - DNA, 25 bp, Homo sapiens
ggtgggttctgtgacgtgaagccat

SEQ ID NO: 19420 - DNA, 25 bp, Homo sapiens
tcacgaattcgctcactggatcaag

SEQ ID NO: 19421 - DNA, 25 bp, Homo sapiens
tttttaccaacctcacatcatgtgt

SEQ ID NO: 19422 - DNA, 25 bp, Homo sapiens
actgtcactgtttcttccaaaagtc

SEQ ID NO: 19423 - DNA, 25 bp, Homo sapiens
atccagtgcaatcaactgtcatttc

SEQ ID NO: 19424 - DNA, 25 bp, Homo sapiens
ccgatgccgtttctacagtaaagtg

SEQ ID NO: 19425 - DNA, 25 bp, Homo sapiens
ctttgctttccttagacttgttctg

SEQ ID NO: 19426 - DNA, 25 bp, Homo sapiens
gaatgtgtaaatgaagcttgcttgg

SEQ ID NO: 19427 - DNA, 25 bp, Homo sapiens
gaggtctgcttcagaaccttttgtt

SEQ ID NO: 19428 - DNA, 25 bp, Homo sapiens
gtgataagctttcatggcagagcac

SEQ ID NO: 19429 - DNA, 25 bp, Homo sapiens
gtgcaatcttcgttgtttttgtatt

SEQ ID NO: 19430 - DNA, 25 bp, Homo sapiens
tactggaatccgatgccgtttctac

SEQ ID NO: 19431 - DNA, 25 bp, Homo sapiens
tgtgggaaaatctcagctgacatca

SEQ ID NO: 19432 - DNA, 25 bp, Homo sapiens
tgttgtcaactgtcactgtttcttc

SEQ ID NO: 19433 - DNA, 25 bp, Homo sapiens
ataagcttgtaactctgactgcgga

SEQ ID NO: 19434 - DNA, 25 bp, Homo sapiens
ccgtgggctccgggactaggagagc

SEQ ID NO: 19435 - DNA, 25 bp, Homo sapiens
ctaggacgcggctaaactcttggcc

SEQ ID NO: 19436 - DNA, 25 bp, Homo sapiens
ctaggagagcgggacggggacctcg

SEQ ID NO: 19437 - DNA, 25 bp, Homo sapiens
ctgccgcgacactgcgagggagcag

SEQ ID NO: 19438 - DNA, 25 bp, Homo sapiens
gagaggcaacgaagtccttagcact

SEQ ID NO: 19439 - DNA, 25 bp, Homo sapiens
gagccgggcgttatattgcgattgg

SEQ ID NO: 19440 - DNA, 25 bp, Homo sapiens
gagcctgcaaaagtgtaatccctgt

SEQ ID NO: 19441 - DNA, 25 bp, Homo sapiens
gattggcactttatgctgaccatcg

SEQ ID NO: 19442 - DNA, 25 bp, Homo sapiens
tcccagctcttgcagctcagctggc

SEQ ID NO: 19443 - DNA, 25 bp, Homo sapiens
tgaccatcggtaacggacatttatc

SEQ ID NO: 19444 - DNA, 25 bp, Homo sapiens
aaatccagaccacatcttgtgccac

SEQ ID NO: 19445 - DNA, 25 bp, Homo sapiens
aagagaaggatccacacagcactgt

SEQ ID NO: 19446 - DNA, 25 bp, Homo sapiens
accacttcagatcaactcgttttta

SEQ ID NO: 19447 - DNA, 25 bp, Homo sapiens
agactgaagagacacgaggcgtact

SEQ ID NO: 19448 - DNA, 25 bp, Homo sapiens
agtggacaggactctgacattctcc

SEQ ID NO: 19449 - DNA, 25 bp, Homo sapiens
gatgagcttgggctaccaaaacttg

SEQ ID NO: 19450 - DNA, 25 bp, Homo sapiens
ggcgtactagtcttttatcagccct

SEQ ID NO: 19451 - DNA, 25 bp, Homo sapiens
ggggctcacaacagtatctcaaaaa

SEQ ID NO: 19452 - DNA, 25 bp, Homo sapiens
ggtaggtgtcacaattgctttgaaa

SEQ ID NO: 19453 - DNA, 25 bp, Homo sapiens
gtcagcccacagactctaacaattg

SEQ ID NO: 19454 - DNA, 25 bp, Homo sapiens
tttccttggtccacaggtaggtgtc

SEQ ID NO: 19455 - DNA, 25 bp, Homo sapiens
agaatactccttggttttctctgaa

SEQ ID NO: 19456 - DNA, 25 bp, Homo sapiens
atggtgttgatccacggggtactgt

SEQ ID NO: 19457 - DNA, 25 bp, Homo sapiens
gcatttcagtgacatcttctttggc

SEQ ID NO: 19458 - DNA, 25 bp, Homo sapiens
ggaagcggggtactggctgtgttta

SEQ ID NO: 19459 - DNA, 25 bp, Homo sapiens
ggcccactgggtactgtgaggactg

SEQ ID NO: 19460 - DNA, 25 bp, Homo sapiens
ggggtactgtgataaccaccatgga

SEQ ID NO: 19461 - DNA, 25 bp, Homo sapiens
gttattggctaatccactgcatggt

SEQ ID NO: 19462 - DNA, 25 bp, Homo sapiens
tactgaagtctgattctttcccggg

SEQ ID NO: 19463 - DNA, 25 bp, Homo sapiens
tcagtgggccaccatgtgccatgat

SEQ ID NO: 19464 - DNA, 25 bp, Homo sapiens
tggatacattttggtggcccactgg

SEQ ID NO: 19465 - DNA, 25 bp, Homo sapiens
tgtgtaacaccttttttggcccatt

SEQ ID NO: 19466 - DNA, 25 bp, Homo sapiens
aaagctgtgctaacatctcacctct

SEQ ID NO: 19467 - DNA, 25 bp, Homo sapiens
aagccagttgctctggctgtgtggc

SEQ ID NO: 19468 - DNA, 25 bp, Homo sapiens
aatagaaccatctttcaaggctttt

SEQ ID NO: 19469 - DNA, 25 bp, Homo sapiens
atagatctaggggggtacacacgta

SEQ ID NO: 19470 - DNA, 25 bp, Homo sapiens
atctcacctctactgctttgatgtg

SEQ ID NO: 19471 - DNA, 25 bp, Homo sapiens
gaccacctgtggaactagtacctaa

SEQ ID NO: 19472 - DNA, 25 bp, Homo sapiens
gcacagttagcttcagtgtggcccg

SEQ ID NO: 19473 - DNA, 25 bp, Homo sapiens
ggcttcagaggcacatttccagtta

SEQ ID NO: 19474 - DNA, 25 bp, Homo sapiens
gtaatgctggggtttaggcttctag

SEQ ID NO: 19475 - DNA, 25 bp, Homo sapiens
gtgtggcccgttatctaatagaacc

SEQ ID NO: 19476 - DNA, 25 bp, Homo sapiens
taggcttctagtgaacccatcaccc

SEQ ID NO: 19477 - DNA, 25 bp, Homo sapiens
aatatcacagtggtcttttgttttc

SEQ ID NO: 19478 - DNA, 25 bp, Homo sapiens
acctgctacaccttactgacaaaac

SEQ ID NO: 19479 - DNA, 25 bp, Homo sapiens
ccacgtctgaattgttctcttgtgc

SEQ ID NO: 19480 - DNA, 25 bp, Homo sapiens
gatttcttttcagctttctttgtat

SEQ ID NO: 19481 - DNA, 25 bp, Homo sapiens
gcttggttaatatgtacttctctag

SEQ ID NO: 19482 - DNA, 25 bp, Homo sapiens
ggatagcatgttacctaagctttta

SEQ ID NO: 19483 - DNA, 25 bp, Homo sapiens
tatgtacttctctagattgttcaaa

SEQ ID NO: 19484 - DNA, 25 bp, Homo sapiens
tgaattgttctcttgtgcttggtta

SEQ ID NO: 19485 - DNA, 25 bp, Homo sapiens
tgacattccttactctttggttttc

SEQ ID NO: 19486 - DNA, 25 bp, Homo sapiens
ttcagctttctttgtatatcagtaa

SEQ ID NO: 19487 - DNA, 25 bp, Homo sapiens
tttgatgtctgatcatttgcatgga

SEQ ID NO: 19488 - DNA, 25 bp, Homo sapiens
actacgtattcattgtctacctgct

SEQ ID NO: 19489 - DNA, 25 bp, Homo sapiens
agaatacactctggacctgtgctgt

SEQ ID NO: 19490 - DNA, 25 bp, Homo sapiens
atcacagttctgttggaccaatcta

SEQ ID NO: 19491 - DNA, 25 bp, Homo sapiens
attcctcaattgggctggccacatt

SEQ ID NO: 19492 - DNA, 25 bp, Homo sapiens
atttccctaaatcctgagactgaga

SEQ ID NO: 19493 - DNA, 25 bp, Homo sapiens
caaattctcagatggcgaccgtgta

SEQ ID NO: 19494 - DNA, 25 bp, Homo sapiens
gactttagtcactgtcttcttgctt

SEQ ID NO: 19495 - DNA, 25 bp, Homo sapiens
gggtctacttctactgtattggcga

SEQ ID NO: 19496 - DNA, 25 bp, Homo sapiens
gtcaagggttcactgcatttctcct

SEQ ID NO: 19497 - DNA, 25 bp, Homo sapiens
tcactacccacctgtggctagggtc

SEQ ID NO: 19498 - DNA, 25 bp, Homo sapiens
tcttgcttcagacccatctatattt

SEQ ID NO: 19499 - DNA, 25 bp, Homo sapiens
aacttgcttctgtaaattgcgtaaa

SEQ ID NO: 19500 - DNA, 25 bp, Homo sapiens
aatgctttattgtggaaactgcttc

SEQ ID NO: 19501 - DNA, 25 bp, Homo sapiens
ctaagctccgttttctatttcttgg

SEQ ID NO: 19502 - DNA, 25 bp, Homo sapiens
ctcctgctctccatcatgttatgga

SEQ ID NO: 19503 - DNA, 25 bp, Homo sapiens
gaataacctaaccaagatgccttta

SEQ ID NO: 19504 - DNA, 25 bp, Homo sapiens
gaatgcatgatctcaagccttaact

SEQ ID NO: 19505 - DNA, 25 bp, Homo sapiens
gaccagtgaggaaccagtgttaact

SEQ ID NO: 19506 - DNA, 25 bp, Homo sapiens
gccttaactactataatctttttct

SEQ ID NO: 19507 - DNA, 25 bp, Homo sapiens
gctggtgctttatctaagctccgtt

SEQ ID NO: 19508 - DNA, 25 bp, Homo sapiens
ggtgacaatgtgacagctggtgctt

SEQ ID NO: 19509 - DNA, 25 bp, Homo sapiens
tgtaaaccttgtttgccagttacct

SEQ ID NO: 19510 - DNA, 25 bp, Homo sapiens
agaaggctggtgaccaggtcccagg

SEQ ID NO: 19511 - DNA, 25 bp, Homo sapiens
aggcctcccagagaaggctggtgac

SEQ ID NO: 19512 - DNA, 25 bp, Homo sapiens
ccgggtcacgtgcagcaggaacaag

SEQ ID NO: 19513 - DNA, 25 bp, Homo sapiens
cgtggacacagccagaactcatcac

SEQ ID NO: 19514 - DNA, 25 bp, Homo sapiens
ctcactcgaaggaggtgccaccatt

SEQ ID NO: 19515 - DNA, 25 bp, Homo sapiens
gaactcatcacagaggctggcgtcc

SEQ ID NO: 19516 - DNA, 25 bp, Homo sapiens
ggtggagggacaccgggagagccag

SEQ ID NO: 19517 - DNA, 25 bp, Homo sapiens
gtgccaccatttcagctttggtagc

SEQ ID NO: 19518 - DNA, 25 bp, Homo sapiens
gtgcccgtgttcttgcgaaagcggg

SEQ ID NO: 19519 - DNA, 25 bp, Homo sapiens
tgactgtcacgcagaatccgcagac

SEQ ID NO: 19520 - DNA, 25 bp, Homo sapiens
tgctggccacgagtgctggacagag

SEQ ID NO: 19521 - DNA, 25 bp, Homo sapiens
aattgttctgaaggtttttgccaag

SEQ ID NO: 19522 - DNA, 25 bp, Homo sapiens
agtgggcacctaatatcatcatcat

SEQ ID NO: 19523 - DNA, 25 bp, Homo sapiens
atctaaagtcatacaccttgctcct

SEQ ID NO: 19524 - DNA, 25 bp, Homo sapiens
atgactcacgccctatttagttatt

SEQ ID NO: 19525 - DNA, 25 bp, Homo sapiens
attaatgctactaccctattttgag

SEQ ID NO: 19526 - DNA, 25 bp, Homo sapiens
cagggaatctttctcatgactcacg

SEQ ID NO: 19527 - DNA, 25 bp, Homo sapiens
cagtctactcagcttgacaagtgtt

SEQ ID NO: 19528 - DNA, 25 bp, Homo sapiens
ccttgctcctcatttctgagtggga

SEQ ID NO: 19529 - DNA, 25 bp, Homo sapiens
gtgatggggtgacaatgcaaagctg

SEQ ID NO: 19530 - DNA, 25 bp, Homo sapiens
taggtccctaagtacattgtccaga

SEQ ID NO: 19531 - DNA, 25 bp, Homo sapiens
tttagccccatatacttcttgaatc

SEQ ID NO: 19532 - DNA, 25 bp, Homo sapiens
acacgtacacataaatacacccagc

SEQ ID NO: 19533 - DNA, 25 bp, Homo sapiens
cttcaagcccaatgccggtgcagag

SEQ ID NO: 19534 - DNA, 25 bp, Homo sapiens
gaaggtcacagccacactgaaaatg

SEQ ID NO: 19535 - DNA, 25 bp, Homo sapiens
gaatgatcaaggactctacacactg

SEQ ID NO: 19536 - DNA, 25 bp, Homo sapiens
gactctacacactgggtggcttgga

SEQ ID NO: 19537 - DNA, 25 bp, Homo sapiens
gcatgtttgttgtgctccttttttc

SEQ ID NO: 19538 - DNA, 25 bp, Homo sapiens
gcgagctctacagtaggtgacctgg

SEQ ID NO: 19539 - DNA, 25 bp, Homo sapiens
ggggaatggcttagcgagctctaca

SEQ ID NO: 19540 - DNA, 25 bp, Homo sapiens
ggtgacactctacagtctgactgat

SEQ ID NO: 19541 - DNA, 25 bp, Homo sapiens
ggtgttgagttcacttcaagcccaa

SEQ ID NO: 19542 - DNA, 25 bp, Homo sapiens
tacacccagcacttgcaaggctaga

SEQ ID NO: 19543 - DNA, 25 bp, Homo sapiens
agaaatgatgctgagggacctagtg

SEQ ID NO: 19544 - DNA, 25 bp, Homo sapiens
agacttacaatcagtggtcctggtt

SEQ ID NO: 19545 - DNA, 25 bp, Homo sapiens
atggggtaggacacccagattttca

SEQ ID NO: 19546 - DNA, 25 bp, Homo sapiens
ctcttgagtcttgcttaggctcgca

SEQ ID NO: 19547 - DNA, 25 bp, Homo sapiens
cttttgttgaatcctatgctactga

SEQ ID NO: 19548 - DNA, 25 bp, Homo sapiens
gaggcattcatgaaggcttttgttg

SEQ ID NO: 19549 - DNA, 25 bp, Homo sapiens
gatatcttggcctggttatggggta

SEQ ID NO: 19550 - DNA, 25 bp, Homo sapiens
gccactgtagcgcctttttaaaata

SEQ ID NO: 19551 - DNA, 25 bp, Homo sapiens
ggaagtcttggaaaatctaccactt

SEQ ID NO: 19552 - DNA, 25 bp, Homo sapiens
tagcattgggggcagatatcttggc

SEQ ID NO: 19553 - DNA, 25 bp, Homo sapiens
tctaccacttacactgtgtgtcccc

SEQ ID NO: 19554 - DNA, 25 bp, Homo sapiens
aagaatttactctctgaccagcaat

SEQ ID NO: 19555 - DNA, 25 bp, Homo sapiens
aagactcagactttcaccacatttg

SEQ ID NO: 19556 - DNA, 25 bp, Homo sapiens
agagccaagtcaacagcttttatca

SEQ ID NO: 19557 - DNA, 25 bp, Homo sapiens
atttctacatttttagcgaccacta

SEQ ID NO: 19558 - DNA, 25 bp, Homo sapiens
gacaatgtaatttgcactccctatg

SEQ ID NO: 19559 - DNA, 25 bp, Homo sapiens
gacactctcagaatatcatacttgg

SEQ ID NO: 19560 - DNA, 25 bp, Homo sapiens
gaccactagtggaagacattcccca

SEQ ID NO: 19561 - DNA, 25 bp, Homo sapiens
gagccagattcagattttacccatg

SEQ ID NO: 19562 - DNA, 25 bp, Homo sapiens
gccgaatctgagtcaacagctgccc

SEQ ID NO: 19563 - DNA, 25 bp, Homo sapiens
gtagtctattatttgggcatttgct

SEQ ID NO: 19564 - DNA, 25 bp, Homo sapiens
ttgcactccctatgatatttctaca

SEQ ID NO: 19565 - DNA, 25 bp, Homo sapiens
aaattctagctattgctttcctata

SEQ ID NO: 19566 - DNA, 25 bp, Homo sapiens
aacacacgagtgtatgtctcacaat

SEQ ID NO: 19567 - DNA, 25 bp, Homo sapiens
agctataatggatgctttgtttaat

SEQ ID NO: 19568 - DNA, 25 bp, Homo sapiens
attgctttcctataaatgtttgggt

SEQ ID NO: 19569 - DNA, 25 bp, Homo sapiens
ctgatctttcatggctgagctgcaa

SEQ ID NO: 19570 - DNA, 25 bp, Homo sapiens
gaatatgataccttgtcacatgtaa

SEQ ID NO: 19571 - DNA, 25 bp, Homo sapiens
gagatgctcttttccaagctataat

SEQ ID NO: 19572 - DNA, 25 bp, Homo sapiens
gctgagctgcaatctaacactttac

SEQ ID NO: 19573 - DNA, 25 bp, Homo sapiens
ggttaatagttttccagttgcattt

SEQ ID NO: 19574 - DNA, 25 bp, Homo sapiens
tgtttgggttgtgtttggtattgtt

SEQ ID NO: 19575 - DNA, 25 bp, Homo sapiens
ttccaaagttcagccagttatcagt

SEQ ID NO: 19576 - DNA, 25 bp, Homo sapiens
agattggacatttgctgttcagatg

SEQ ID NO: 19577 - DNA, 25 bp, Homo sapiens
atttttctctatttaacattcctca

SEQ ID NO: 19578 - DNA, 25 bp, Homo sapiens
gaacaaccagtcatgtggccaaaag

SEQ ID NO: 19579 - DNA, 25 bp, Homo sapiens
gaagtatcgtggtagtggcagtcta

SEQ ID NO: 19580 - DNA, 25 bp, Homo sapiens
gatgttcacttggagtttacttttt

SEQ ID NO: 19581 - DNA, 25 bp, Homo sapiens
ggcaaataggacattccttctgtgt

SEQ ID NO: 19582 - DNA, 25 bp, Homo sapiens
gggatcacacaacttacttaatcgt

SEQ ID NO: 19583 - DNA, 25 bp, Homo sapiens
gtggacttgacttggacctttaact

SEQ ID NO: 19584 - DNA, 25 bp, Homo sapiens
tatatgtcaatggcccatgtcctcc

SEQ ID NO: 19585 - DNA, 25 bp, Homo sapiens
tatctcagaatcctgtgacctccag

SEQ ID NO: 19586 - DNA, 25 bp, Homo sapiens
tgttagatttcttgtgctgggccag

SEQ ID NO: 19587 - DNA, 25 bp, Homo sapiens
aagcaggcattgtctagctcttagg

SEQ ID NO: 19588 - DNA, 25 bp, Homo sapiens
aattgttctaatccatttactgcag

SEQ ID NO: 19589 - DNA, 25 bp, Homo sapiens
agagtcagatgaggctgcagtccag

SEQ ID NO: 19590 - DNA, 25 bp, Homo sapiens
aggacagaagtatcatccctacccc

SEQ ID NO: 19591 - DNA, 25 bp, Homo sapiens
caaggttactgcattccggatctct

SEQ ID NO: 19592 - DNA, 25 bp, Homo sapiens
gaagcagggcctaggagacacgtga

SEQ ID NO: 19593 - DNA, 25 bp, Homo sapiens
gtgtgtgtaaggtatgttctgcttt

SEQ ID NO: 19594 - DNA, 25 bp, Homo sapiens
tactgcagatttcacccttataagt

SEQ ID NO: 19595 - DNA, 25 bp, Homo sapiens
tgcagtccagggttgaaattatcac

SEQ ID NO: 19596 - DNA, 25 bp, Homo sapiens
ttaggtgaagggagtctctgctttt

SEQ ID NO: 19597 - DNA, 25 bp, Homo sapiens
tttccagcctcatttatagtaaaca

SEQ ID NO: 19598 - DNA, 25 bp, Homo sapiens
aacagtctactgaggcacaagttct

SEQ ID NO: 19599 - DNA, 25 bp, Homo sapiens
atgatacccgaccctctagggaaat

SEQ ID NO: 19600 - DNA, 25 bp, Homo sapiens
attttcctagtatcactctttaatc

SEQ ID NO: 19601 - DNA, 25 bp, Homo sapiens
cctttaggatttcacagccatgctg

SEQ ID NO: 19602 - DNA, 25 bp, Homo sapiens
gaggcatttctgattagcccttccc

SEQ ID NO: 19603 - DNA, 25 bp, Homo sapiens
gcaagctgtaccaaacagggccttg

SEQ ID NO: 19604 - DNA, 25 bp, Homo sapiens
taactcacaatgcttcctggggtat

SEQ ID NO: 19605 - DNA, 25 bp, Homo sapiens
tgcagtctggaacagcttcctagca

SEQ ID NO: 19606 - DNA, 25 bp, Homo sapiens
ttaaattctactctctcatcagcac

SEQ ID NO: 19607 - DNA, 25 bp, Homo sapiens
tttcatggcctccgtagtaactcac

SEQ ID NO: 19608 - DNA, 25 bp, Homo sapiens
tttcccgtgctagccatttggggga

SEQ ID NO: 19609 - DNA, 25 bp, Homo sapiens
agggctaacttgaccaataggctca

SEQ ID NO: 19610 - DNA, 25 bp, Homo sapiens
ataaccactggattgtgagaccata

SEQ ID NO: 19611 - DNA, 25 bp, Homo sapiens
ccttcaagttcttatctttaaatgg

SEQ ID NO: 19612 - DNA, 25 bp, Homo sapiens
gaccaataggctcaatagattcagt

SEQ ID NO: 19613 - DNA, 25 bp, Homo sapiens
gagaccataggacatttgaacaatc

SEQ ID NO: 19614 - DNA, 25 bp, Homo sapiens
gaggtactcaaagtttggttcatgg

SEQ ID NO: 19615 - DNA, 25 bp, Homo sapiens
ggggaaggctgggcaagggctaact

SEQ ID NO: 19616 - DNA, 25 bp, Homo sapiens
ggttcatggactagtgccagttcac

SEQ ID NO: 19617 - DNA, 25 bp, Homo sapiens
tcttgttggccaggcccacttgaag

SEQ ID NO: 19618 - DNA, 25 bp, Homo sapiens
ttcagtgtctcccaaaggctggatg

SEQ ID NO: 19619 - DNA, 25 bp, Homo sapiens
tttcttctacccatctagaaaagca

SEQ ID NO: 19620 - DNA, 25 bp, Homo sapiens
aagggtcttggataccagcacattg

SEQ ID NO: 19621 - DNA, 25 bp, Homo sapiens
aatacaatgacttctctgagccact

SEQ ID NO: 19622 - DNA, 25 bp, Homo sapiens
agcggctatcttttggggtggagta

SEQ ID NO: 19623 - DNA, 25 bp, Homo sapiens
atctctccacccttatataatcatt

SEQ ID NO: 19624 - DNA, 25 bp, Homo sapiens
cccttacctatattcagcatccagt

SEQ ID NO: 19625 - DNA, 25 bp, Homo sapiens
ctctgagccactgtaagggaccacc

SEQ ID NO: 19626 - DNA, 25 bp, Homo sapiens
gagggagatagcctgacctctgtcc

SEQ ID NO: 19627 - DNA, 25 bp, Homo sapiens
gatatttccctatacctatgtaccc

SEQ ID NO: 19628 - DNA, 25 bp, Homo sapiens
gtacaaattacccaaatctctccac

SEQ ID NO: 19629 - DNA, 25 bp, Homo sapiens
gtcaagagtggcccctggcgaatac

SEQ ID NO: 19630 - DNA, 25 bp, Homo sapiens
gtttcagtgaacccttacctatatt

SEQ ID NO: 19631 - DNA, 25 bp, Homo sapiens
aatggttttgctgcagattctgggt

SEQ ID NO: 19632 - DNA, 25 bp, Homo sapiens
acattaactgcgctgtattatctac

SEQ ID NO: 19633 - DNA, 25 bp, Homo sapiens
atgctccagcatgtgatatctgtat

SEQ ID NO: 19634 - DNA, 25 bp, Homo sapiens
attagcgttgcattgtcatgctcca

SEQ ID NO: 19635 - DNA, 25 bp, Homo sapiens
gaagttatttcaattactctgatac

SEQ ID NO: 19636 - DNA, 25 bp, Homo sapiens
gcaattcttggtcctgagctattca

SEQ ID NO: 19637 - DNA, 25 bp, Homo sapiens
ggctaacagcaattcttggtcctga

SEQ ID NO: 19638 - DNA, 25 bp, Homo sapiens
ggtcctgagctattcagttcataca

SEQ ID NO: 19639 - DNA, 25 bp, Homo sapiens
gtgtgctttactacctgtatatgaa

SEQ ID NO: 19640 - DNA, 25 bp, Homo sapiens
tatttctctttcaaaggctaacagc

SEQ ID NO: 19641 - DNA, 25 bp, Homo sapiens
tcacattatccccgtgtgctttact

SEQ ID NO: 19642 - DNA, 25 bp, Homo sapiens
aaattgccggcgacgacttttgtct

SEQ ID NO: 19643 - DNA, 25 bp, Homo sapiens
agcaaggaccggacgcttgctagcc

SEQ ID NO: 19644 - DNA, 25 bp, Homo sapiens
caaaagcggctgccaaaccgtttcg

SEQ ID NO: 19645 - DNA, 25 bp, Homo sapiens
cccccggcatagatgtgcacatcgg

SEQ ID NO: 19646 - DNA, 25 bp, Homo sapiens
gaacgaagttacagcttatcctacc

SEQ ID NO: 19647 - DNA, 25 bp, Homo sapiens
gactacgtgttttagaactgtgctg

SEQ ID NO: 19648 - DNA, 25 bp, Homo sapiens
gatgtgcacatcggttttccagtgt

SEQ ID NO: 19649 - DNA, 25 bp, Homo sapiens
gcattttatatgatccttagcacat

SEQ ID NO: 19650 - DNA, 25 bp, Homo sapiens
gtgcttctctcaaatctctttataa

SEQ ID NO: 19651 - DNA, 25 bp, Homo sapiens
ttacagcttatcctaccgtgtgtgt

SEQ ID NO: 19652 - DNA, 25 bp, Homo sapiens
ttggttccgtgtaagtagttgacta

SEQ ID NO: 19653 - DNA, 25 bp, Homo sapiens
aacatttcttaccaccagatggatc

SEQ ID NO: 19654 - DNA, 25 bp, Homo sapiens
agaaagatgatacctctgcattttc

SEQ ID NO: 19655 - DNA, 25 bp, Homo sapiens
atgcaagcccgtttcttttgatgta

SEQ ID NO: 19656 - DNA, 25 bp, Homo sapiens
cttttgagagtgcctttgaccagct

SEQ ID NO: 19657 - DNA, 25 bp, Homo sapiens
gcaaacgggcatttccttgaacttt

SEQ ID NO: 19658 - DNA, 25 bp, Homo sapiens
gctgttcgcagctgggaaactccaa

SEQ ID NO: 19659 - DNA, 25 bp, Homo sapiens
gggagccattgcttatgcaagcccg

SEQ ID NO: 19660 - DNA, 25 bp, Homo sapiens
ggtgtaatacccttaatgagatcaa

SEQ ID NO: 19661 - DNA, 25 bp, Homo sapiens
tgaagtcagagcttggagcggcccc

SEQ ID NO: 19662 - DNA, 25 bp, Homo sapiens
tgggacgctttcaattggtttccaa

SEQ ID NO: 19663 - DNA, 25 bp, Homo sapiens
tttttcccgagaagagctccagctc

SEQ ID NO: 19664 - DNA, 25 bp, Homo sapiens
aatactgccatttccaagcagtgtt

SEQ ID NO: 19665 - DNA, 25 bp, Homo sapiens
atagaattgttagatccgttgttga

SEQ ID NO: 19666 - DNA, 25 bp, Homo sapiens
gaatacttatgaactgctgcaaaac

SEQ ID NO: 19667 - DNA, 25 bp, Homo sapiens
gacgatgcctaaagattccaccgct

SEQ ID NO: 19668 - DNA, 25 bp, Homo sapiens
gagtagtgattccgtaagagctgat

SEQ ID NO: 19669 - DNA, 25 bp, Homo sapiens
gattgaatgggtgctgtggatgtga

SEQ ID NO: 19670 - DNA, 25 bp, Homo sapiens
taaagattccaccgctaatattttt

SEQ ID NO: 19671 - DNA, 25 bp, Homo sapiens
tacgtgtttttttcagacgagcaca

SEQ ID NO: 19672 - DNA, 25 bp, Homo sapiens
tcctcaatccgttgccaactttgat

SEQ ID NO: 19673 - DNA, 25 bp, Homo sapiens
tgccattcagggtggacgatgccta

SEQ ID NO: 19674 - DNA, 25 bp, Homo sapiens
tttccccagatcttgtattacgtgt

SEQ ID NO: 19675 - DNA, 25 bp, Homo sapiens
aatggcactttagcatattgttctg

SEQ ID NO: 19676 - DNA, 25 bp, Homo sapiens
acaacagaagctgcccgcaataatg

SEQ ID NO: 19677 - DNA, 25 bp, Homo sapiens
aggtgcagtcagaacaactcacggt

SEQ ID NO: 19678 - DNA, 25 bp, Homo sapiens
atctatggccactgacagtccacac

SEQ ID NO: 19679 - DNA, 25 bp, Homo sapiens
atgaatttggatacccttttgagga

SEQ ID NO: 19680 - DNA, 25 bp, Homo sapiens
gaaacaggtgctacagtgacactga

SEQ ID NO: 19681 - DNA, 25 bp, Homo sapiens
gaaatctcgtgtctatctcaatggg

SEQ ID NO: 19682 - DNA, 25 bp, Homo sapiens
gacagtccacacttaggcactgaga

SEQ ID NO: 19683 - DNA, 25 bp, Homo sapiens
gatgctctgagccatgaatgtacag

SEQ ID NO: 19684 - DNA, 25 bp, Homo sapiens
tcacaatttatttacatctactttt

SEQ ID NO: 19685 - DNA, 25 bp, Homo sapiens
tgtttcccagagtggaggtgcagtc

SEQ ID NO: 19686 - DNA, 25 bp, Homo sapiens
atatttaatacttctactactcctg

SEQ ID NO: 19687 - DNA, 25 bp, Homo sapiens
atcttccagaacactagcaccatga

SEQ ID NO: 19688 - DNA, 25 bp, Homo sapiens
attacagcatgtcgccttgaaataa

SEQ ID NO: 19689 - DNA, 25 bp, Homo sapiens
ctgaggcctggatctgttaagccct

SEQ ID NO: 19690 - DNA, 25 bp, Homo sapiens
gaaatatacttggttttatctgcta

SEQ ID NO: 19691 - DNA, 25 bp, Homo sapiens
gagttctgaaatactattcctgcta

SEQ ID NO: 19692 - DNA, 25 bp, Homo sapiens
ggatctgttaagcccttgtattgtt

SEQ ID NO: 19693 - DNA, 25 bp, Homo sapiens
ggcagatgcatggactgtattttgc

SEQ ID NO: 19694 - DNA, 25 bp, Homo sapiens
ggctgaagtcccaaaccaagttgtg

SEQ ID NO: 19695 - DNA, 25 bp, Homo sapiens
tgaactccccacacagttttacaga

SEQ ID NO: 19696 - DNA, 25 bp, Homo sapiens
tttgcatgtgtagccctgaggcctg

SEQ ID NO: 19697 - DNA, 25 bp, Homo sapiens
aacagcaatgatgggcagtcgtgga

SEQ ID NO: 19698 - DNA, 25 bp, Homo sapiens
aacataaaccccaacttgtgccatt

SEQ ID NO: 19699 - DNA, 25 bp, Homo sapiens
atgatgggcagtcgtggagttgggg

SEQ ID NO: 19700 - DNA, 25 bp, Homo sapiens
ccccaacttgtgccattctttataa

SEQ ID NO: 19701 - DNA, 25 bp, Homo sapiens
cctctaaggggacgggttcatctga

SEQ ID NO: 19702 - DNA, 25 bp, Homo sapiens
ctctcttggcttcataaacagctgt

SEQ ID NO: 19703 - DNA, 25 bp, Homo sapiens
gcagatgtgatcacatcaccccgtc

SEQ ID NO: 19704 - DNA, 25 bp, Homo sapiens
gctgactccagcatggaggacacca

SEQ ID NO: 19705 - DNA, 25 bp, Homo sapiens
ggcaagatcagatcctggaggactt

SEQ ID NO: 19706 - DNA, 25 bp, Homo sapiens
gggacgggttcatctgagtaaacat

SEQ ID NO: 19707 - DNA, 25 bp, Homo sapiens
gggattgtgtcctctaaggggacgg

SEQ ID NO: 19708 - DNA, 25 bp, Homo sapiens
aaaccactctctttggatgcttgtt

SEQ ID NO: 19709 - DNA, 25 bp, Homo sapiens
aaatgttgacacgtctcctgggaag

SEQ ID NO: 19710 - DNA, 25 bp, Homo sapiens
acatcatcaatgtccaaaccactct

SEQ ID NO: 19711 - DNA, 25 bp, Homo sapiens
gaggcgatggagagctggacactga

SEQ ID NO: 19712 - DNA, 25 bp, Homo sapiens
gatgaggctgggtcacttatgggca

SEQ ID NO: 19713 - DNA, 25 bp, Homo sapiens
gatgcttgttcaatcactgggtcca

SEQ ID NO: 19714 - DNA, 25 bp, Homo sapiens
ggcagattgccacgaacatcatcaa

SEQ ID NO: 19715 - DNA, 25 bp, Homo sapiens
ggcttttcaggataccagtgccctt

SEQ ID NO: 19716 - DNA, 25 bp, Homo sapiens
tatcatccacgtaaagcaccttcac

SEQ ID NO: 19717 - DNA, 25 bp, Homo sapiens
tgggcctctgggttaaagctgtttt

SEQ ID NO: 19718 - DNA, 25 bp, Homo sapiens
ttatccaactcacatccattttcat

SEQ ID NO: 19719 - DNA, 25 bp, Homo sapiens
agacactggtttgccattctgttcc

SEQ ID NO: 19720 - DNA, 25 bp, Homo sapiens
aggaagtccatgtcagaaagccaac

SEQ ID NO: 19721 - DNA, 25 bp, Homo sapiens
caatggggactacggccagacactg

SEQ ID NO: 19722 - DNA, 25 bp, Homo sapiens
ccctctcccaacccttaataatgag

SEQ ID NO: 19723 - DNA, 25 bp, Homo sapiens
ccttaactgccttactcagtgggta

SEQ ID NO: 19724 - DNA, 25 bp, Homo sapiens
gcttcacaggctcctcagatgaaaa

SEQ ID NO: 19725 - DNA, 25 bp, Homo sapiens
ggtgatttccacaactttgaacagg

SEQ ID NO: 19726 - DNA, 25 bp, Homo sapiens
gtaccagtgagagcagcacttccac

SEQ ID NO: 19727 - DNA, 25 bp, Homo sapiens
tacaaacttacccagaagcctctgc

SEQ ID NO: 19728 - DNA, 25 bp, Homo sapiens
tgaatggtccacaagactaccctct

SEQ ID NO: 19729 - DNA, 25 bp, Homo sapiens
ttccactggggctaggcttgagacc

SEQ ID NO: 19730 - DNA, 25 bp, Homo sapiens
aaatcagtgcactgtttctagagag

SEQ ID NO: 19731 - DNA, 25 bp, Homo sapiens
atacctgtccaaaccatatactttt

SEQ ID NO: 19732 - DNA, 25 bp, Homo sapiens
caagttccgttagcttctgtacgcg

SEQ ID NO: 19733 - DNA, 25 bp, Homo sapiens
ccctctgcatttacaaacactttgt

SEQ ID NO: 19734 - DNA, 25 bp, Homo sapiens
gcaaacttcatcaaattgttcccaa

SEQ ID NO: 19735 - DNA, 25 bp, Homo sapiens
gcatctcactagctatactggcatc

SEQ ID NO: 19736 - DNA, 25 bp, Homo sapiens
gttgtgtcacactaactgattctgc

SEQ ID NO: 19737 - DNA, 25 bp, Homo sapiens
taactgattctgctctttttgtctt

SEQ ID NO: 19738 - DNA, 25 bp, Homo sapiens
tactggcatcatcttggtaaactga

SEQ ID NO: 19739 - DNA, 25 bp, Homo sapiens
tctcttccagaggcgagggggctga

SEQ ID NO: 19740 - DNA, 25 bp, Homo sapiens
tttgcagtctggtgtctcttccaga

SEQ ID NO: 19741 - DNA, 25 bp, Homo sapiens
aatcgatttgtctgtcaaggtccta

SEQ ID NO: 19742 - DNA, 25 bp, Homo sapiens
agcctctggaagatagctttctcct

SEQ ID NO: 19743 - DNA, 25 bp, Homo sapiens
caaagaacatctgcactcctgaaca

SEQ ID NO: 19744 - DNA, 25 bp, Homo sapiens
cccctggactatggtgctgtatata

SEQ ID NO: 19745 - DNA, 25 bp, Homo sapiens
ctgaacacaccctgaagaaatcctg

SEQ ID NO: 19746 - DNA, 25 bp, Homo sapiens
gaaatcctgggaattgaccttgtaa

SEQ ID NO: 19747 - DNA, 25 bp, Homo sapiens
gggtaggggagcattctgcctaaca

SEQ ID NO: 19748 - DNA, 25 bp, Homo sapiens
gggtggtgacgtgttgatgaggcag

SEQ ID NO: 19749 - DNA, 25 bp, Homo sapiens
gtcttcactctatacttaatctcac

SEQ ID NO: 19750 - DNA, 25 bp, Homo sapiens
tatatggaattcctctactgcccag

SEQ ID NO: 19751 - DNA, 25 bp, Homo sapiens
tttgcccaatctaatgctctcagga

SEQ ID NO: 19752 - DNA, 25 bp, Homo sapiens
aagtaatcacatatatattctctct

SEQ ID NO: 19753 - DNA, 25 bp, Homo sapiens
acagcagctggtgctagtcagagct

SEQ ID NO: 19754 - DNA, 25 bp, Homo sapiens
ataaaaagacccccaactgagcaca

SEQ ID NO: 19755 - DNA, 25 bp, Homo sapiens
atacttatcaaacagctttcaatca

SEQ ID NO: 19756 - DNA, 25 bp, Homo sapiens
catactgcatgactgaggattttgg

SEQ ID NO: 19757 - DNA, 25 bp, Homo sapiens
gagagattcatctgcaatatttgga

SEQ ID NO: 19758 - DNA, 25 bp, Homo sapiens
gatatactcttctaattcacctctg

SEQ ID NO: 19759 - DNA, 25 bp, Homo sapiens
ggaaaccttcgctttatttgacaat

SEQ ID NO: 19760 - DNA, 25 bp, Homo sapiens
ggaacaccaatggaggtctacgtca

SEQ ID NO: 19761 - DNA, 25 bp, Homo sapiens
ggaggtctacgtcaacacagaattt

SEQ ID NO: 19762 - DNA, 25 bp, Homo sapiens
gtaatcatgccaattccagatcaat

SEQ ID NO: 19763 - DNA, 25 bp, Homo sapiens
aaacttggtggcatccaacctgcct

SEQ ID NO: 19764 - DNA, 25 bp, Homo sapiens
caagtcttacatgcccattcagctt

SEQ ID NO: 19765 - DNA, 25 bp, Homo sapiens
cctcattcggcctgaccggtagagg

SEQ ID NO: 19766 - DNA, 25 bp, Homo sapiens
ctggcacacctaactagcattggca

SEQ ID NO: 19767 - DNA, 25 bp, Homo sapiens
gaggagagtctacactctcttcctc

SEQ ID NO: 19768 - DNA, 25 bp, Homo sapiens
gcagacacaactgcctatgttcccc

SEQ ID NO: 19769 - DNA, 25 bp, Homo sapiens
gcatccctccccaaataaaggctta

SEQ ID NO: 19770 - DNA, 25 bp, Homo sapiens
gctttaagaaatcctgcctctgtgc

SEQ ID NO: 19771 - DNA, 25 bp, Homo sapiens
tgactgctccaggattataccacag

SEQ ID NO: 19772 - DNA, 25 bp, Homo sapiens
tgagactagaacccttgtcttcctc

SEQ ID NO: 19773 - DNA, 25 bp, Homo sapiens
ttctccaccgagctttggtgctttg

SEQ ID NO: 19774 - DNA, 25 bp, Homo sapiens
acagccaggtgcagcagaccattgc

SEQ ID NO: 19775 - DNA, 25 bp, Homo sapiens
actgattataaccactcgggcacca

SEQ ID NO: 19776 - DNA, 25 bp, Homo sapiens
actggttgttcatacctttcttgcc

SEQ ID NO: 19777 - DNA, 25 bp, Homo sapiens
catcaactttgacagcttcgtggct

SEQ ID NO: 19778 - DNA, 25 bp, Homo sapiens
cctcttcaaactattcagccttctg

SEQ ID NO: 19779 - DNA, 25 bp, Homo sapiens
ctttcttgccctgggtctatttcag

SEQ ID NO: 19780 - DNA, 25 bp, Homo sapiens
gatgcccacgagatgaggacagccc

SEQ ID NO: 19781 - DNA, 25 bp, Homo sapiens
gcggtatgcgtgcagcaagcttggc

SEQ ID NO: 19782 - DNA, 25 bp, Homo sapiens
ggtttcggacatcagtgacactccc

SEQ ID NO: 19783 - DNA, 25 bp, Homo sapiens
tcgtggcttgtatgatccgcctgga

SEQ ID NO: 19784 - DNA, 25 bp, Homo sapiens
tggtctgacccggggtttcggacat

SEQ ID NO: 19785 - DNA, 25 bp, Homo sapiens
aaatttccatcagttcattcatgaa

SEQ ID NO: 19786 - DNA, 25 bp, Homo sapiens
agaaggcagctgctcatttccagca

SEQ ID NO: 19787 - DNA, 25 bp, Homo sapiens
agagtacaaggactggtaggcctgt

SEQ ID NO: 19788 - DNA, 25 bp, Homo sapiens
atgactgcagtccaaggacattttc

SEQ ID NO: 19789 - DNA, 25 bp, Homo sapiens
atggtaggtgtttacccatcatagg

SEQ ID NO: 19790 - DNA, 25 bp, Homo sapiens
atgtggtgattacacttcatgctga

SEQ ID NO: 19791 - DNA, 25 bp, Homo sapiens
ctccttctttgcgctatggtaggtg

SEQ ID NO: 19792 - DNA, 25 bp, Homo sapiens
gaagcttttcacatgagtgctttca

SEQ ID NO: 19793 - DNA, 25 bp, Homo sapiens
gcctgttggctgttcctgtttaagg

SEQ ID NO: 19794 - DNA, 25 bp, Homo sapiens
gctcatttccagcaggggaagtagc

SEQ ID NO: 19795 - DNA, 25 bp, Homo sapiens
tccctggtttttggccagtctaaat

SEQ ID NO: 19796 - DNA, 25 bp, Homo sapiens
aacacttccatacagtgaacgccat

SEQ ID NO: 19797 - DNA, 25 bp, Homo sapiens
atcaagagcacttccaaattacagg

SEQ ID NO: 19798 - DNA, 25 bp, Homo sapiens
gaacgccataagcacaactgcaagc

SEQ ID NO: 19799 - DNA, 25 bp, Homo sapiens
gacatctgcaccatggtaaccacag

SEQ ID NO: 19800 - DNA, 25 bp, Homo sapiens
gagtttatgaccgaaggcaggagcc

SEQ ID NO: 19801 - DNA, 25 bp, Homo sapiens
gcagacatttcagcatatcaagagc

SEQ ID NO: 19802 - DNA, 25 bp, Homo sapiens
ggaaagatgtttaacgtcactaatt

SEQ ID NO: 19803 - DNA, 25 bp, Homo sapiens
gggcaaaatgtggcagtgcagacat

SEQ ID NO: 19804 - DNA, 25 bp, Homo sapiens
gtaaccacagtggcgagtgttcatt

SEQ ID NO: 19805 - DNA, 25 bp, Homo sapiens
gtcactcctcaaatggttttctgga

SEQ ID NO: 19806 - DNA, 25 bp, Homo sapiens
gtggcgagtgttcattgtagtacct

SEQ ID NO: 19807 - DNA, 25 bp, Homo sapiens
aaggatacaaaagacatctgcacca

SEQ ID NO: 19808 - DNA, 25 bp, Homo sapiens
accactagacaacgcaggttgccgc

SEQ ID NO: 19809 - DNA, 25 bp, Homo sapiens
actctgcctgactgcatactttggc

SEQ ID NO: 19810 - DNA, 25 bp, Homo sapiens
agacaacgcaggttgccgcatactt

SEQ ID NO: 19811 - DNA, 25 bp, Homo sapiens
ctcgctcttgccctgtttgaagagc

SEQ ID NO: 19812 - DNA, 25 bp, Homo sapiens
gcagaagtactctgcctgactgcat

SEQ ID NO: 19813 - DNA, 25 bp, Homo sapiens
ggccacctcaatagcagaagtactc

SEQ ID NO: 19814 - DNA, 25 bp, Homo sapiens
ttgaagagcctgagttgcttcccct

SEQ ID NO: 19815 - DNA, 25 bp, Homo sapiens
ttgccgcatacttctttatttgtgt

SEQ ID NO: 19816 - DNA, 25 bp, Homo sapiens
tttatttgtgtagacctcgctcttg

SEQ ID NO: 19817 - DNA, 25 bp, Homo sapiens
tttcttggccacctcaatagcagaa

SEQ ID NO: 19818 - DNA, 25 bp, Homo sapiens
atagcttgaccgtaatttcatgaga

SEQ ID NO: 19819 - DNA, 25 bp, Homo sapiens
atctttatagcttttctgtacctaa

SEQ ID NO: 19820 - DNA, 25 bp, Homo sapiens
atttcatgagagaccttcagccaga

SEQ ID NO: 19821 - DNA, 25 bp, Homo sapiens
gaagtgtttgttgtagtacgccgct

SEQ ID NO: 19822 - DNA, 25 bp, Homo sapiens
gcagccctgtctaatagcttgaccg

SEQ ID NO: 19823 - DNA, 25 bp, Homo sapiens
gtacctaatattgtgtcttgtgcgt

SEQ ID NO: 19824 - DNA, 25 bp, Homo sapiens
gtacgccgctaaatttggggcaatt

SEQ ID NO: 19825 - DNA, 25 bp, Homo sapiens
gtgtcacatttatctttatagcttt

SEQ ID NO: 19826 - DNA, 25 bp, Homo sapiens
gtgtcttgtgcgtaggatgtgctca

SEQ ID NO: 19827 - DNA, 25 bp, Homo sapiens
tatagctcatacaatttctgggaaa

SEQ ID NO: 19828 - DNA, 25 bp, Homo sapiens
tatccttgttttaggtggtccaaat

SEQ ID NO: 19829 - DNA, 25 bp, Homo sapiens
aaacagaaaacagctgctccttgaa

SEQ ID NO: 19830 - DNA, 25 bp, Homo sapiens
aaaggacgcagtgtttccacagctc

SEQ ID NO: 19831 - DNA, 25 bp, Homo sapiens
aatctcaaccccagaggcagtcttt

SEQ ID NO: 19832 - DNA, 25 bp, Homo sapiens
acaccgggaaaagccatgctgtcaa

SEQ ID NO: 19833 - DNA, 25 bp, Homo sapiens
aggtggcgctgtggggcaacagaaa

SEQ ID NO: 19834 - DNA, 25 bp, Homo sapiens
cctgctggacacctgtaactacaac

SEQ ID NO: 19835 - DNA, 25 bp, Homo sapiens
gggcgcaagcaaggaacacaaacac

SEQ ID NO: 19836 - DNA, 25 bp, Homo sapiens
ggtgggctcaggaagctgtattatt

SEQ ID NO: 19837 - DNA, 25 bp, Homo sapiens
tagaaacgacacataacaccgggaa

SEQ ID NO: 19838 - DNA, 25 bp, Homo sapiens
tctttagggactggggtgggctcag

SEQ ID NO: 19839 - DNA, 25 bp, Homo sapiens
tgtcaagcatctcagaatctcaacc

SEQ ID NO: 19840 - DNA, 25 bp, Homo sapiens
aagcctttggaactatgaatttgca

SEQ ID NO: 19841 - DNA, 25 bp, Homo sapiens
agggagaagctcacttcttcctttt

SEQ ID NO: 19842 - DNA, 25 bp, Homo sapiens
cagaacagggatctaccatgcagga

SEQ ID NO: 19843 - DNA, 25 bp, Homo sapiens
gaaccagaggcctctaaaatggacc

SEQ ID NO: 19844 - DNA, 25 bp, Homo sapiens
gaatctaggctgtggctgagagaac

SEQ ID NO: 19845 - DNA, 25 bp, Homo sapiens
gcaagcaaacatatcgttccaattt

SEQ ID NO: 19846 - DNA, 25 bp, Homo sapiens
gcaagcataaccaaagatcatcagc

SEQ ID NO: 19847 - DNA, 25 bp, Homo sapiens
gcaggagcttcttgtgctcacacaa

SEQ ID NO: 19848 - DNA, 25 bp, Homo sapiens
ggagaagctcaattttcagtgtttg

SEQ ID NO: 19849 - DNA, 25 bp, Homo sapiens
gggaacattgtacattgtcgaattt

SEQ ID NO: 19850 - DNA, 25 bp, Homo sapiens
tagtttgcagtgctcagtgcacaat

SEQ ID NO: 19851 - DNA, 25 bp, Homo sapiens
aatacatagttgtctcaaaccaagc

SEQ ID NO: 19852 - DNA, 25 bp, Homo sapiens
agacaatggttgctcttgggctctt

SEQ ID NO: 19853 - DNA, 25 bp, Homo sapiens
agacatatgaatccaggctgactgc

SEQ ID NO: 19854 - DNA, 25 bp, Homo sapiens
atacagtcatatggctacacgttta

SEQ ID NO: 19855 - DNA, 25 bp, Homo sapiens
ctgcatttctacctgttagacaatg

SEQ ID NO: 19856 - DNA, 25 bp, Homo sapiens
gagtcttttatctccaaatacatag

SEQ ID NO: 19857 - DNA, 25 bp, Homo sapiens
gctcttgggctcttgttatacagtc

SEQ ID NO: 19858 - DNA, 25 bp, Homo sapiens
ggcaagcactttgttctgagtcttt

SEQ ID NO: 19859 - DNA, 25 bp, Homo sapiens
ggcaagtcattccaaactgcttgaa

SEQ ID NO: 19860 - DNA, 25 bp, Homo sapiens
ggcttaacatgaaactgtctgcatt

SEQ ID NO: 19861 - DNA, 25 bp, Homo sapiens
tgcccatctcgtttgatataaactg

SEQ ID NO: 19862 - DNA, 25 bp, Homo sapiens
agacaccaggaggtgccttgtcggt

SEQ ID NO: 19863 - DNA, 25 bp, Homo sapiens
aggtgccttgtcggtcatatttttc

SEQ ID NO: 19864 - DNA, 25 bp, Homo sapiens
atagctgcaactgagacttcttttt

SEQ ID NO: 19865 - DNA, 25 bp, Homo sapiens
catgctttttgccaataactgttac

SEQ ID NO: 19866 - DNA, 25 bp, Homo sapiens
ctctcccttaactcattgtctttgg

SEQ ID NO: 19867 - DNA, 25 bp, Homo sapiens
gatacaggttgttgatttcatcgtg

SEQ ID NO: 19868 - DNA, 25 bp, Homo sapiens
gatttcatcgtgggtagcaagctag

SEQ ID NO: 19869 - DNA, 25 bp, Homo sapiens
gggggagttagacaccaggaggtgc

SEQ ID NO: 19870 - DNA, 25 bp, Homo sapiens
gtcggtcatatttttcagcacgtca

SEQ ID NO: 19871 - DNA, 25 bp, Homo sapiens
ttgccaataactgttaccgccgttc

SEQ ID NO: 19872 - DNA, 25 bp, Homo sapiens
tttttcagcacgtcatcaatcctat

SEQ ID NO: 19873 - DNA, 25 bp, Homo sapiens
acccacgctctgacgagaggctttt

SEQ ID NO: 19874 - DNA, 25 bp, Homo sapiens
agctctaccacattcaggaggcctc

SEQ ID NO: 19875 - DNA, 25 bp, Homo sapiens
agtagtggctgagctctgtgatcgc

SEQ ID NO: 19876 - DNA, 25 bp, Homo sapiens
caaaaatggctctctaggtgggctg

SEQ ID NO: 19877 - DNA, 25 bp, Homo sapiens
ccactcagagtctgggtctcactgg

SEQ ID NO: 19878 - DNA, 25 bp, Homo sapiens
ctcgcccagcacttgcggctgggcc

SEQ ID NO: 19879 - DNA, 25 bp, Homo sapiens
ctgtgatcgctgtgatgtggaccca

SEQ ID NO: 19880 - DNA, 25 bp, Homo sapiens
gccatgagagcacatgtcctctggc

SEQ ID NO: 19881 - DNA, 25 bp, Homo sapiens
gtgagtggaaatcccccacgagggt

SEQ ID NO: 19882 - DNA, 25 bp, Homo sapiens
tcccacccagaactctggccaaaaa

SEQ ID NO: 19883 - DNA, 25 bp, Homo sapiens
tctctgtttccattatcacccagag

SEQ ID NO: 19884 - DNA, 25 bp, Homo sapiens
aagcagccgctgagacggacggttc

SEQ ID NO: 19885 - DNA, 25 bp, Homo sapiens
atgcttcggggagcctgatgctgaa

SEQ ID NO: 19886 - DNA, 25 bp, Homo sapiens
cacccaatcttggaagccctgagta

SEQ ID NO: 19887 - DNA, 25 bp, Homo sapiens
cagcagcatttttcgaggagagtga

SEQ ID NO: 19888 - DNA, 25 bp, Homo sapiens
ctacccgggacatcttcatggaaaa

SEQ ID NO: 19889 - DNA, 25 bp, Homo sapiens
ctggaggataagcaaagccaccccg

SEQ ID NO: 19890 - DNA, 25 bp, Homo sapiens
cttctacaagctccggtggctggag

SEQ ID NO: 19891 - DNA, 25 bp, Homo sapiens
gaggaacagacccctttagtcctca

SEQ ID NO: 19892 - DNA, 25 bp, Homo sapiens
ggcacggatcacatcctgggaagaa

SEQ ID NO: 19893 - DNA, 25 bp, Homo sapiens
gggacccaggtgtgaacggatgaat

SEQ ID NO: 19894 - DNA, 25 bp, Homo sapiens
gtcctcatcccttagatcctggagg

SEQ ID NO: 19895 - DNA, 25 bp, Homo sapiens
aaccccactgaagcgcttatggagt

SEQ ID NO: 19896 - DNA, 25 bp, Homo sapiens
caagagccactaggataaccccact

SEQ ID NO: 19897 - DNA, 25 bp, Homo sapiens
cagtccactgctcctatagattggg

SEQ ID NO: 19898 - DNA, 25 bp, Homo sapiens
ctcctatagattgggtcctcccttc

SEQ ID NO: 19899 - DNA, 25 bp, Homo sapiens
gaagtttttagtatctgtctgcatt

SEQ ID NO: 19900 - DNA, 25 bp, Homo sapiens
gagaagagcacgagataccaacccc

SEQ ID NO: 19901 - DNA, 25 bp, Homo sapiens
ggaatgggaagaagtctccacctaa

SEQ ID NO: 19902 - DNA, 25 bp, Homo sapiens
gtaagcgaccagcaagcagtccact

SEQ ID NO: 19903 - DNA, 25 bp, Homo sapiens
taagacacacttccacaagagccac

SEQ ID NO: 19904 - DNA, 25 bp, Homo sapiens
tctccacctaaatgcagcagccggg

SEQ ID NO: 19905 - DNA, 25 bp, Homo sapiens
tgtccatgaaatattccacctgcag

SEQ ID NO: 19906 - DNA, 25 bp, Homo sapiens
atctggacacgagcagtccctgagg

SEQ ID NO: 19907 - DNA, 25 bp, Homo sapiens
caacacttggagatttttccggagg

SEQ ID NO: 19908 - DNA, 25 bp, Homo sapiens
ccacagcttctcgactgcagtgggg

SEQ ID NO: 19909 - DNA, 25 bp, Homo sapiens
gccgcggtggaaacgggcttggagc

SEQ ID NO: 19910 - DNA, 25 bp, Homo sapiens
gctctgctagggagaagcctgtgtg

SEQ ID NO: 19911 - DNA, 25 bp, Homo sapiens
gctggccaagatctggacacgagca

SEQ ID NO: 19912 - DNA, 25 bp, Homo sapiens
ggcacacctcttcaagggagcgtga

SEQ ID NO: 19913 - DNA, 25 bp, Homo sapiens
ggcacagagaatccattttctacac

SEQ ID NO: 19914 - DNA, 25 bp, Homo sapiens
gggacactgctggcaaacggagacc

SEQ ID NO: 19915 - DNA, 25 bp, Homo sapiens
taataaagatgacctggacccctgc

SEQ ID NO: 19916 - DNA, 25 bp, Homo sapiens
tacaaagaacccttgacctggggcg

SEQ ID NO: 19917 - DNA, 25 bp, Homo sapiens
aaaacacatcactaatattcgctat

SEQ ID NO: 19918 - DNA, 25 bp, Homo sapiens
aaatcttcattccctgtaggcattt

SEQ ID NO: 19919 - DNA, 25 bp, Homo sapiens
acagttttagccacatatcagatat

SEQ ID NO: 19920 - DNA, 25 bp, Homo sapiens
caaaacacgtatattggctttcttt

SEQ ID NO: 19921 - DNA, 25 bp, Homo sapiens
gaagtgtgtgggattcctcaattat

SEQ ID NO: 19922 - DNA, 25 bp, Homo sapiens
gccaaaaggcctggcttctgatagg

SEQ ID NO: 19923 - DNA, 25 bp, Homo sapiens
gtggtttggcctctaatttaattct

SEQ ID NO: 19924 - DNA, 25 bp, Homo sapiens
taatattcgctattactctcctggt

SEQ ID NO: 19925 - DNA, 25 bp, Homo sapiens
tactctcctggtctgaagtcagctt

SEQ ID NO: 19926 - DNA, 25 bp, Homo sapiens
tcagactctcctgtcaggactcaag

SEQ ID NO: 19927 - DNA, 25 bp, Homo sapiens
ttatggctaacattctgcctccatt

SEQ ID NO: 19928 - DNA, 25 bp, Homo sapiens
aacggattccattcatgcttttgag

SEQ ID NO: 19929 - DNA, 25 bp, Homo sapiens
atcctttctgcactgcgggagttgt

SEQ ID NO: 19930 - DNA, 25 bp, Homo sapiens
ctccttcatcttcctttgatgtcgg

SEQ ID NO: 19931 - DNA, 25 bp, Homo sapiens
gaaagctgttacctgattcctttcc

SEQ ID NO: 19932 - DNA, 25 bp, Homo sapiens
gaataacatcatgcactcgggcttt

SEQ ID NO: 19933 - DNA, 25 bp, Homo sapiens
ggactgtggcagcatggcatgggtc

SEQ ID NO: 19934 - DNA, 25 bp, Homo sapiens
gtcctccagttcacatgctgattgc

SEQ ID NO: 19935 - DNA, 25 bp, Homo sapiens
taatcttttctacctatacttcttc

SEQ ID NO: 19936 - DNA, 25 bp, Homo sapiens
tgatgtcggtaactcatcctttctg

SEQ ID NO: 19937 - DNA, 25 bp, Homo sapiens
ttctgcgtttatgcaacttccttgc

SEQ ID NO: 19938 - DNA, 25 bp, Homo sapiens
tttcctgagatcacttccagcctaa

SEQ ID NO: 19939 - DNA, 25 bp, Homo sapiens
aatcttttggtggaggtgccttcag

SEQ ID NO: 19940 - DNA, 25 bp, Homo sapiens
caccctcactcttcagttcaagaag

SEQ ID NO: 19941 - DNA, 25 bp, Homo sapiens
catatttgttagcagagcccctctt

SEQ ID NO: 19942 - DNA, 25 bp, Homo sapiens
cccctcttatcttgagaactccatt

SEQ ID NO: 19943 - DNA, 25 bp, Homo sapiens
gaagcactcacttaagcattcctgg

SEQ ID NO: 19944 - DNA, 25 bp, Homo sapiens
gactgcctaccaaccatatttgtta

SEQ ID NO: 19945 - DNA, 25 bp, Homo sapiens
gatgtcttcttgttgcgctgagaac

SEQ ID NO: 19946 - DNA, 25 bp, Homo sapiens
gtcagccggcttgtagtcatgagga

SEQ ID NO: 19947 - DNA, 25 bp, Homo sapiens
gtcatgaggacaaccctttttggtg

SEQ ID NO: 19948 - DNA, 25 bp, Homo sapiens
tgttcatgacgagattcctggcacc

SEQ ID NO: 19949 - DNA, 25 bp, Homo sapiens
ttgattcccctttgcagtgattggt

SEQ ID NO: 19950 - DNA, 25 bp, Homo sapiens
aaatttattatctcagtgtctttat

SEQ ID NO: 19951 - DNA, 25 bp, Homo sapiens
actgaagaatcccagtgagttctgc

SEQ ID NO: 19952 - DNA, 25 bp, Homo sapiens
atctcagtgtctttatttagcataa

SEQ ID NO: 19953 - DNA, 25 bp, Homo sapiens
cccctttcagcagcattctttttag

SEQ ID NO: 19954 - DNA, 25 bp, Homo sapiens
cccttagcatctttctagccaatga

SEQ ID NO: 19955 - DNA, 25 bp, Homo sapiens
gatggaatctctgtcaggggacaaa

SEQ ID NO: 19956 - DNA, 25 bp, Homo sapiens
gcattctttttagatttaggtactg

SEQ ID NO: 19957 - DNA, 25 bp, Homo sapiens
ggaggagggatggcctgactgaaac

SEQ ID NO: 19958 - DNA, 25 bp, Homo sapiens
gggacaaacagctgtagcatcccct

SEQ ID NO: 19959 - DNA, 25 bp, Homo sapiens
gtatcttgcaagtttgtataaaccc

SEQ ID NO: 19960 - DNA, 25 bp, Homo sapiens
tagcatctttctagccaatgagccc

SEQ ID NO: 19961 - DNA, 25 bp, Homo sapiens
aaagcctcacaatacgagttatacc

SEQ ID NO: 19962 - DNA, 25 bp, Homo sapiens
aaaggtggtgagtccttgggtgcgc

SEQ ID NO: 19963 - DNA, 25 bp, Homo sapiens
cccagcccaggacgtggtacagagt

SEQ ID NO: 19964 - DNA, 25 bp, Homo sapiens
ccttgggtgcgcagtggagctgctc

SEQ ID NO: 19965 - DNA, 25 bp, Homo sapiens
cgagttataccaatacaggctcacc

SEQ ID NO: 19966 - DNA, 25 bp, Homo sapiens
ctggactgcgtcattttcccaggaa

SEQ ID NO: 19967 - DNA, 25 bp, Homo sapiens
gctcagctcagtgctgactcagttc

SEQ ID NO: 19968 - DNA, 25 bp, Homo sapiens
gctttgcccagcttgacagggagtg

SEQ ID NO: 19969 - DNA, 25 bp, Homo sapiens
ggtcacaagatatctcaaaagcctc

SEQ ID NO: 19970 - DNA, 25 bp, Homo sapiens
ttcagaggattcttccctcaggacc

SEQ ID NO: 19971 - DNA, 25 bp, Homo sapiens
ttcccctaaagggcctggactgcgt

SEQ ID NO: 19972 - DNA, 25 bp, Homo sapiens
aattaattgataccagatttcactg

SEQ ID NO: 19973 - DNA, 25 bp, Homo sapiens
acatatggtggactgttattaagag

SEQ ID NO: 19974 - DNA, 25 bp, Homo sapiens
agttgcatattataacagtctcgaa

SEQ ID NO: 19975 - DNA, 25 bp, Homo sapiens
caagttcttgaatttgattctaagt

SEQ ID NO: 19976 - DNA, 25 bp, Homo sapiens
cagatttcactggaacagtttcaac

SEQ ID NO: 19977 - DNA, 25 bp, Homo sapiens
gaaatcgagtttgtaaatgtccttt

SEQ ID NO: 19978 - DNA, 25 bp, Homo sapiens
gaatttgtgcaatgttagattttct

SEQ ID NO: 19979 - DNA, 25 bp, Homo sapiens
gattttcttatcaatcaagttcttg

SEQ ID NO: 19980 - DNA, 25 bp, Homo sapiens
gtatttgttttaagtcattcaggaa

SEQ ID NO: 19981 - DNA, 25 bp, Homo sapiens
tcatttgacctacctaattgctaaa

SEQ ID NO: 19982 - DNA, 25 bp, Homo sapiens
tttacttgcccaacaaatattactt

SEQ ID NO: 19983 - DNA, 25 bp, Homo sapiens
aaattggactgttacatgcactttc

SEQ ID NO: 19984 - DNA, 25 bp, Homo sapiens
aactgagacgtaacattttgccttg

SEQ ID NO: 19985 - DNA, 25 bp, Homo sapiens
aagtatagcatcttgaacaaccttc

SEQ ID NO: 19986 - DNA, 25 bp, Homo sapiens
aatacttactaacaacagagatact

SEQ ID NO: 19987 - DNA, 25 bp, Homo sapiens
agcgttgttttggtagttgaaactg

SEQ ID NO: 19988 - DNA, 25 bp, Homo sapiens
gaaaatgtagatgctcttgtatata

SEQ ID NO: 19989 - DNA, 25 bp, Homo sapiens
gactgttacatgcactttcttggaa

SEQ ID NO: 19990 - DNA, 25 bp, Homo sapiens
gcatcttgaacaaccttcagtggag

SEQ ID NO: 19991 - DNA, 25 bp, Homo sapiens
gctggaatttcacaatgctgctaag

SEQ ID NO: 19992 - DNA, 25 bp, Homo sapiens
gtacatatgttccttacaagagcaa

SEQ ID NO: 19993 - DNA, 25 bp, Homo sapiens
ttgccttgtaggtatattcacgata

SEQ ID NO: 19994 - DNA, 25 bp, Homo sapiens
atcttagcagtgttaccaactctac

SEQ ID NO: 19995 - DNA, 25 bp, Homo sapiens
atgtttctgtgttgtgtcaaaatga

SEQ ID NO: 19996 - DNA, 25 bp, Homo sapiens
gaggagactggtgccaagtagctga

SEQ ID NO: 19997 - DNA, 25 bp, Homo sapiens
gcgacagctatggtacatttgtttt

SEQ ID NO: 19998 - DNA, 25 bp, Homo sapiens
gggatattctgttcgtaaaaatctt

SEQ ID NO: 19999 - DNA, 25 bp, Homo sapiens
gtagattctcatacatgtcacatac

SEQ ID NO: 20000 - DNA, 25 bp, Homo sapiens
gtgttaccaactctacgatatatat

SEQ ID NO: 20001 - DNA, 25 bp, Homo sapiens
taaaacgttacaaagcgacagctat

SEQ ID NO: 20002 - DNA, 25 bp, Homo sapiens
taaccggacctaacttcctgagtgc

SEQ ID NO: 20003 - DNA, 25 bp, Homo sapiens
tcatttacaacagggttctttttat

SEQ ID NO: 20004 - DNA, 25 bp, Homo sapiens
ttgtgtgaagctaaccggacctaac

SEQ ID NO: 20005 - DNA, 25 bp, Homo sapiens
aatgaagtgcaagacctgctctccc

SEQ ID NO: 20006 - DNA, 25 bp, Homo sapiens
catggcgcatcaaaaacccacacct

SEQ ID NO: 20007 - DNA, 25 bp, Homo sapiens
ccagctgcctcgaatatctgacagc

SEQ ID NO: 20008 - DNA, 25 bp, Homo sapiens
cctcggaaagggggacatcctcctg

SEQ ID NO: 20009 - DNA, 25 bp, Homo sapiens
gatgccctgaatgacgcactggaga

SEQ ID NO: 20010 - DNA, 25 bp, Homo sapiens
gcactggcacacgctatggcaaatg

SEQ ID NO: 20011 - DNA, 25 bp, Homo sapiens
gggccaaagctttccataggcgtgc

SEQ ID NO: 20012 - DNA, 25 bp, Homo sapiens
tacattattcagcagcctcgaaaat

SEQ ID NO: 20013 - DNA, 25 bp, Homo sapiens
tccagcaacagtgcacatggcgcat

SEQ ID NO: 20014 - DNA, 25 bp, Homo sapiens
tccataggcgtgctgcacttgcttg

SEQ ID NO: 20015 - DNA, 25 bp, Homo sapiens
ttaaaacacagccgtctggccagct

SEQ ID NO: 20016 - DNA, 25 bp, Homo sapiens
aagtgtgtacctacgtgtcaggccc

SEQ ID NO: 20017 - DNA, 25 bp, Homo sapiens
atctggagtggacgcgtgcactacc

SEQ ID NO: 20018 - DNA, 25 bp, Homo sapiens
gcctgctcacatgaccgtgtggaga

SEQ ID NO: 20019 - DNA, 25 bp, Homo sapiens
ggacgaatgcagagccctaggtctc

SEQ ID NO: 20020 - DNA, 25 bp, Homo sapiens
gtctcctctccagaaagaccggatt

SEQ ID NO: 20021 - DNA, 25 bp, Homo sapiens
gtgatgctgatgtgtgactgctgcc

SEQ ID NO: 20022 - DNA, 25 bp, Homo sapiens
gtttaaggcatttccaaagctctgt

SEQ ID NO: 20023 - DNA, 25 bp, Homo sapiens
tactcttgcactgtgcactcttcgt

SEQ ID NO: 20024 - DNA, 25 bp, Homo sapiens
tcagtcccccggatgggtgtttaag

SEQ ID NO: 20025 - DNA, 25 bp, Homo sapiens
tctttccctgaggaccatctggagt

SEQ ID NO: 20026 - DNA, 25 bp, Homo sapiens
tttaccagccgaatactcttgcact

SEQ ID NO: 20027 - DNA, 25 bp, Homo sapiens
agagattgtccgacctaatgccacc

SEQ ID NO: 20028 - DNA, 25 bp, Homo sapiens
agatttttctgtagctccatgtttc

SEQ ID NO: 20029 - DNA, 25 bp, Homo sapiens
atattgtgactcttcatgtgtccac

SEQ ID NO: 20030 - DNA, 25 bp, Homo sapiens
atgccacctggcagatgtgtaccca

SEQ ID NO: 20031 - DNA, 25 bp, Homo sapiens
atgtgtccacaggagctcttgtgtg

SEQ ID NO: 20032 - DNA, 25 bp, Homo sapiens
gctcaagactcagccacaatatgca

SEQ ID NO: 20033 - DNA, 25 bp, Homo sapiens
gtgactgcactgtggaactcttctt

SEQ ID NO: 20034 - DNA, 25 bp, Homo sapiens
tagctccatgtttcccataaagggc

SEQ ID NO: 20035 - DNA, 25 bp, Homo sapiens
tgatttagacatttgccagtgcacc

SEQ ID NO: 20036 - DNA, 25 bp, Homo sapiens
ttgccagtgcaccaaaccatgagag

SEQ ID NO: 20037 - DNA, 25 bp, Homo sapiens
ttggaaccaggcacatttggcccct

SEQ ID NO: 20038 - DNA, 25 bp, Homo sapiens
aagtgcccacgtgaatttgctggtg

SEQ ID NO: 20039 - DNA, 25 bp, Homo sapiens
aatccacagaagatgttacttgcac

SEQ ID NO: 20040 - DNA, 25 bp, Homo sapiens
actcctttatcatggtactgtaact

SEQ ID NO: 20041 - DNA, 25 bp, Homo sapiens
acttgtgtgtaaattctacttcctc

SEQ ID NO: 20042 - DNA, 25 bp, Homo sapiens
atacctttttatactcctttatcat

SEQ ID NO: 20043 - DNA, 25 bp, Homo sapiens
ggtgcaactaactactgtgtgagga

SEQ ID NO: 20044 - DNA, 25 bp, Homo sapiens
gtactgtaactgtatccatattata

SEQ ID NO: 20045 - DNA, 25 bp, Homo sapiens
gtatttatactctggtgcaactaac

SEQ ID NO: 20046 - DNA, 25 bp, Homo sapiens
tctctctgtgacatgtgactctgtc

SEQ ID NO: 20047 - DNA, 25 bp, Homo sapiens
ttcctcttgtgtgttttaccaagta

SEQ ID NO: 20048 - DNA, 25 bp, Homo sapiens
tttttttatgtccaagtgcccacgt

SEQ ID NO: 20049 - DNA, 25 bp, Homo sapiens
aaatagggattctgtgtctttgtgt

SEQ ID NO: 20050 - DNA, 25 bp, Homo sapiens
atgtttgcacggtggggggatgggt

SEQ ID NO: 20051 - DNA, 25 bp, Homo sapiens
cataactttgatgggggcagtgagg

SEQ ID NO: 20052 - DNA, 25 bp, Homo sapiens
catccaagccattgtaagagttcca

SEQ ID NO: 20053 - DNA, 25 bp, Homo sapiens
gagtttggggaggattcgtggtctt

SEQ ID NO: 20054 - DNA, 25 bp, Homo sapiens
gccattgtaagagttccacagagct

SEQ ID NO: 20055 - DNA, 25 bp, Homo sapiens
gggagggcgtggaaatagggattct

SEQ ID NO: 20056 - DNA, 25 bp, Homo sapiens
gtgtcataactttgatgggggcagt

SEQ ID NO: 20057 - DNA, 25 bp, Homo sapiens
gtgtctttgtgtcataactttgatg

SEQ ID NO: 20058 - DNA, 25 bp, Homo sapiens
tgaaaatatcagattgcacccccct

SEQ ID NO: 20059 - DNA, 25 bp, Homo sapiens
ttgtaagagttccacagagctctgg

SEQ ID NO: 20060 - DNA, 25 bp, Homo sapiens
aatgtgaccgtagtgccggggactg

SEQ ID NO: 20061 - DNA, 25 bp, Homo sapiens
acactcctcaagacacatccagaga

SEQ ID NO: 20062 - DNA, 25 bp, Homo sapiens
agacacatccagagactgttgctgt

SEQ ID NO: 20063 - DNA, 25 bp, Homo sapiens
cagcatggatctggctggacccgat

SEQ ID NO: 20064 - DNA, 25 bp, Homo sapiens
cagtctcccataccttatttattgg

SEQ ID NO: 20065 - DNA, 25 bp, Homo sapiens
gaaggccacaggggtggggcagcca

SEQ ID NO: 20066 - DNA, 25 bp, Homo sapiens
gacccgatgctgtccagaactggga

SEQ ID NO: 20067 - DNA, 25 bp, Homo sapiens
gctgtctgtgggcagagttctgtgt

SEQ ID NO: 20068 - DNA, 25 bp, Homo sapiens
gggggaagcccatgggagaattttg

SEQ ID NO: 20069 - DNA, 25 bp, Homo sapiens
gttctggccaatgtgaccgtagtgc

SEQ ID NO: 20070 - DNA, 25 bp, Homo sapiens
ttctgtgttctggccaatgtgaccg

SEQ ID NO: 20071 - DNA, 25 bp, Homo sapiens
cagcccttcctgttgattacaaagc

SEQ ID NO: 20072 - DNA, 25 bp, Homo sapiens
ctgaggaatgcactgtctcgcagca

SEQ ID NO: 20073 - DNA, 25 bp, Homo sapiens
gctacaggtcttactatggacacca

SEQ ID NO: 20074 - DNA, 25 bp, Homo sapiens
gtgtcactgctgcattggtgtggca

SEQ ID NO: 20075 - DNA, 25 bp, Homo sapiens
gttccatgagctgcctatgatatgc

SEQ ID NO: 20076 - DNA, 25 bp, Homo sapiens
gttggctcgcaatatgggtcgacgt

SEQ ID NO: 20077 - DNA, 25 bp, Homo sapiens
tcctcagttccgtctaaatgtgttt

SEQ ID NO: 20078 - DNA, 25 bp, Homo sapiens
tctgttctccagttgcactgaggaa

SEQ ID NO: 20079 - DNA, 25 bp, Homo sapiens
tcttctgcttcaattacaccagttc

SEQ ID NO: 20080 - DNA, 25 bp, Homo sapiens
ttacccagggtgtgccattgcagtg

SEQ ID NO: 20081 - DNA, 25 bp, Homo sapiens
tttcaaatcccctttcgcagtgaaa

SEQ ID NO: 20082 - DNA, 25 bp, Homo sapiens
attattgcgcattttcatttgggtc

SEQ ID NO: 20083 - DNA, 25 bp, Homo sapiens
cctgctagaatgtgactttggggtc

SEQ ID NO: 20084 - DNA, 25 bp, Homo sapiens
gcgatttatgccttgtagcctttcc

SEQ ID NO: 20085 - DNA, 25 bp, Homo sapiens
gctgcaagtgatctgtaatccctat

SEQ ID NO: 20086 - DNA, 25 bp, Homo sapiens
gggtcattatgttcgtgctgcaagt

SEQ ID NO: 20087 - DNA, 25 bp, Homo sapiens
ggtgagatgggatattggcgattta

SEQ ID NO: 20088 - DNA, 25 bp, Homo sapiens
gtgtgtggttagtccatgaactcat

SEQ ID NO: 20089 - DNA, 25 bp, Homo sapiens
tggaactgtagagcatccatccatc

SEQ ID NO: 20090 - DNA, 25 bp, Homo sapiens
tgtggtgcatctgtggtttggtaga

SEQ ID NO: 20091 - DNA, 25 bp, Homo sapiens
ttctgtgcatgttctggtcgcatgt

SEQ ID NO: 20092 - DNA, 25 bp, Homo sapiens
ttgggtcttaacttattggaactgt

SEQ ID NO: 20093 - DNA, 25 bp, Homo sapiens
acataatttacctttcagtcaccac

SEQ ID NO: 20094 - DNA, 25 bp, Homo sapiens
agctgttccagcaaccatagactga

SEQ ID NO: 20095 - DNA, 25 bp, Homo sapiens
ataactatatagaagctgttccagc

SEQ ID NO: 20096 - DNA, 25 bp, Homo sapiens
cagtcaccacaaatttataggcatt

SEQ ID NO: 20097 - DNA, 25 bp, Homo sapiens
gacctgttccggtatccatgaggac

SEQ ID NO: 20098 - DNA, 25 bp, Homo sapiens
gaggttgggtttgtcatcacagagg

SEQ ID NO: 20099 - DNA, 25 bp, Homo sapiens
ggtttgtcatcacagagggggtggg

SEQ ID NO: 20100 - DNA, 25 bp, Homo sapiens
gttccggtatccatgaggacataat

SEQ ID NO: 20101 - DNA, 25 bp, Homo sapiens
taggcatttgtatcctggactaaaa

SEQ ID NO: 20102 - DNA, 25 bp, Homo sapiens
tccatttatttaagacctgttccgg

SEQ ID NO: 20103 - DNA, 25 bp, Homo sapiens
tttacctttcagtcaccacaaattt

SEQ ID NO: 20104 - DNA, 25 bp, Homo sapiens
agcctaaattccctcatctataaaa

SEQ ID NO: 20105 - DNA, 25 bp, Homo sapiens
cctcttacttggcgaccactgatga

SEQ ID NO: 20106 - DNA, 25 bp, Homo sapiens
gaggtagcagagtctcttgggatga

SEQ ID NO: 20107 - DNA, 25 bp, Homo sapiens
gagtctcttgggatgagtgattcac

SEQ ID NO: 20108 - DNA, 25 bp, Homo sapiens
gataatattatctacctcacaagct

SEQ ID NO: 20109 - DNA, 25 bp, Homo sapiens
gatgagtgattcaccctcttacttg

SEQ ID NO: 20110 - DNA, 25 bp, Homo sapiens
ggcgaccactgatgagatcaacaac

SEQ ID NO: 20111 - DNA, 25 bp, Homo sapiens
taccctccagagctaagaggtagca

SEQ ID NO: 20112 - DNA, 25 bp, Homo sapiens
tgctttttaccctccagagctaaga

SEQ ID NO: 20113 - DNA, 25 bp, Homo sapiens
ttatctacctcacaagcttatgaaa

SEQ ID NO: 20114 - DNA, 25 bp, Homo sapiens
ttggagcctaaattccctcatctat

SEQ ID NO: 20115 - DNA, 25 bp, Homo sapiens
aagcacttggcatgtgagggctatt

SEQ ID NO: 20116 - DNA, 25 bp, Homo sapiens
actggctcacctttagaatgtctgt

SEQ ID NO: 20117 - DNA, 25 bp, Homo sapiens
caagttatttaacccattggagcct

SEQ ID NO: 20118 - DNA, 25 bp, Homo sapiens
cagtcactggctcacctttagaatg

SEQ ID NO: 20119 - DNA, 25 bp, Homo sapiens
cctcctcatggcagtcattcagtat

SEQ ID NO: 20120 - DNA, 25 bp, Homo sapiens
cgtgaccaaaattcacatccctcct

SEQ ID NO: 20121 - DNA, 25 bp, Homo sapiens
ctgagcaccaattcctggattccag

SEQ ID NO: 20122 - DNA, 25 bp, Homo sapiens
gaatgtctgttgctattcactgctc

SEQ ID NO: 20123 - DNA, 25 bp, Homo sapiens
gacaattacctgtccagtgtggtat

SEQ ID NO: 20124 - DNA, 25 bp, Homo sapiens
gagtgtaggtgttggcacgtgacca

SEQ ID NO: 20125 - DNA, 25 bp, Homo sapiens
tcgctcctcttaacagcttggggag

SEQ ID NO: 20126 - DNA, 25 bp, Homo sapiens
cagactttggtgccagtttgctagg

SEQ ID NO: 20127 - DNA, 25 bp, Homo sapiens
cctgtcccttgtgagcactatgaaa

SEQ ID NO: 20128 - DNA, 25 bp, Homo sapiens
ctagggcccctcagtgtaatgtagg

SEQ ID NO: 20129 - DNA, 25 bp, Homo sapiens
gaggggtgcagatcggacaggaagt

SEQ ID NO: 20130 - DNA, 25 bp, Homo sapiens
gggtggggtctgtaccggaagacag

SEQ ID NO: 20131 - DNA, 25 bp, Homo sapiens
ggttttagagcagttcctctgcctc

SEQ ID NO: 20132 - DNA, 25 bp, Homo sapiens
gtcaggattctgttacttcttggta

SEQ ID NO: 20133 - DNA, 25 bp, Homo sapiens
taagctccacacctgtcaggattct

SEQ ID NO: 20134 - DNA, 25 bp, Homo sapiens
tgatgccgactttctgggtgtggcc

SEQ ID NO: 20135 - DNA, 25 bp, Homo sapiens
tggtaactgggacttgcccaacttt

SEQ ID NO: 20136 - DNA, 25 bp, Homo sapiens
ttgctaggttcgaatcctgactccc

SEQ ID NO: 20137 - DNA, 25 bp, Homo sapiens
aggatcattctagcaggctttccca

SEQ ID NO: 20138 - DNA, 25 bp, Homo sapiens
ccctccagagatccagagtccagga

SEQ ID NO: 20139 - DNA, 25 bp, Homo sapiens
ctccagctctgctagctctatatat

SEQ ID NO: 20140 - DNA, 25 bp, Homo sapiens
gaagctgcatattctggactctaat

SEQ ID NO: 20141 - DNA, 25 bp, Homo sapiens
gacttcacaagcaactcaggatcat

SEQ ID NO: 20142 - DNA, 25 bp, Homo sapiens
gctgctggtcccaggaccacatttt

SEQ ID NO: 20143 - DNA, 25 bp, Homo sapiens
ggacttcaaatcacttgtcttcaga

SEQ ID NO: 20144 - DNA, 25 bp, Homo sapiens
ggctttcccactgtcaaacagagac

SEQ ID NO: 20145 - DNA, 25 bp, Homo sapiens
taaatgccattcagtctggacttca

SEQ ID NO: 20146 - DNA, 25 bp, Homo sapiens
ttaattcactccaggatggcacgca

SEQ ID NO: 20147 - DNA, 25 bp, Homo sapiens
ttcagaatcacctagatgcctccac

SEQ ID NO: 20148 - DNA, 25 bp, Homo sapiens
ctagtccaagttggccttcagctct

SEQ ID NO: 20149 - DNA, 25 bp, Homo sapiens
ctcttgtctgagggttacttggtaa

SEQ ID NO: 20150 - DNA, 25 bp, Homo sapiens
cttctttctttattaggccactcca

SEQ ID NO: 20151 - DNA, 25 bp, Homo sapiens
gaacgcctagtccaagttggccttc

SEQ ID NO: 20152 - DNA, 25 bp, Homo sapiens
gagagccttcaggtgagaacgccta

SEQ ID NO: 20153 - DNA, 25 bp, Homo sapiens
ggggatttttatatacaccatttgt

SEQ ID NO: 20154 - DNA, 25 bp, Homo sapiens
taagtttttactgagttatcttctt

SEQ ID NO: 20155 - DNA, 25 bp, Homo sapiens
ttatcttcttattaactcttgtctg

SEQ ID NO: 20156 - DNA, 25 bp, Homo sapiens
ttctccaatcgtctgattaggggat

SEQ ID NO: 20157 - DNA, 25 bp, Homo sapiens
ttgatttttctccaatcgtctgatt

SEQ ID NO: 20158 - DNA, 25 bp, Homo sapiens
ttttcttatcctattaatacaaact

SEQ ID NO: 20159 - DNA, 25 bp, Homo sapiens
acaagtgcctagagctcgacgatgc

SEQ ID NO: 20160 - DNA, 25 bp, Homo sapiens
acccagggcttcatcggctggagat

SEQ ID NO: 20161 - DNA, 25 bp, Homo sapiens
caaagcccaaaatcgagcttcctga

SEQ ID NO: 20162 - DNA, 25 bp, Homo sapiens
caaagtgtgccttagacattctcaa

SEQ ID NO: 20163 - DNA, 25 bp, Homo sapiens
caagcagggcgtgcactgaatccag

SEQ ID NO: 20164 - DNA, 25 bp, Homo sapiens
gaagtacatcaaggtctttccatcc

SEQ ID NO: 20165 - DNA, 25 bp, Homo sapiens
gacattctcaagtcatcagcgtcac

SEQ ID NO: 20166 - DNA, 25 bp, Homo sapiens
gtgctgcatatcggtcaccaggcac

SEQ ID NO: 20167 - DNA, 25 bp, Homo sapiens
tccacacccattcttggctaatgta

SEQ ID NO: 20168 - DNA, 25 bp, Homo sapiens
tgaatccagacggagttctgcccag

SEQ ID NO: 20169 - DNA, 25 bp, Homo sapiens
ttgcacgagagctgtgctggcccaa

SEQ ID NO: 20170 - DNA, 25 bp, Homo sapiens
aacatgaagttggcagccttcctcc

SEQ ID NO: 20171 - DNA, 25 bp, Homo sapiens
ataaatttcagctgctctcagccct

SEQ ID NO: 20172 - DNA, 25 bp, Homo sapiens
cacagggtgggtggctattctccag

SEQ ID NO: 20173 - DNA, 25 bp, Homo sapiens
ccaaagccttccaacagcaacatga

SEQ ID NO: 20174 - DNA, 25 bp, Homo sapiens
cctggagttcctatcttccaagatg

SEQ ID NO: 20175 - DNA, 25 bp, Homo sapiens
gcagggcttaggtgtctgcagtccc

SEQ ID NO: 20176 - DNA, 25 bp, Homo sapiens
gctctgcacaggtgactgggactgc

SEQ ID NO: 20177 - DNA, 25 bp, Homo sapiens
ggatcatctttccctaagatcgtca

SEQ ID NO: 20178 - DNA, 25 bp, Homo sapiens
gtgactgtctggagttccttgacta

SEQ ID NO: 20179 - DNA, 25 bp, Homo sapiens
gtgtggccatgagtgtgttgcaggg

SEQ ID NO: 20180 - DNA, 25 bp, Homo sapiens
tgcaggagaccggcttttgggtacc

SEQ ID NO: 20181 - DNA, 25 bp, Homo sapiens
aaccatgtggttgttccacggttca

SEQ ID NO: 20182 - DNA, 25 bp, Homo sapiens
atggctttcatagctgggacaagta

SEQ ID NO: 20183 - DNA, 25 bp, Homo sapiens
ccacctttttccgtcaaagtgcttg

SEQ ID NO: 20184 - DNA, 25 bp, Homo sapiens
gatattcttcagtttcatactgctg

SEQ ID NO: 20185 - DNA, 25 bp, Homo sapiens
gcgtgtaaaacttcacaccgtgtgt

SEQ ID NO: 20186 - DNA, 25 bp, Homo sapiens
gctgcagacactgtaactggtctcc

SEQ ID NO: 20187 - DNA, 25 bp, Homo sapiens
gtcaaagtgcttgctatggctttca

SEQ ID NO: 20188 - DNA, 25 bp, Homo sapiens
taaatcaagcttgacctcctctttt

SEQ ID NO: 20189 - DNA, 25 bp, Homo sapiens
tccctcctttctaatccaagatcat

SEQ ID NO: 20190 - DNA, 25 bp, Homo sapiens
ttcacgttgacttcctatctcagga

SEQ ID NO: 20191 - DNA, 25 bp, Homo sapiens
ttccacggttcatctggctaccgtt

SEQ ID NO: 20192 - DNA, 25 bp, Homo sapiens
aagaacctgcagattcttccatcct

SEQ ID NO: 20193 - DNA, 25 bp, Homo sapiens
accttgtggcttggctggaatccag

SEQ ID NO: 20194 - DNA, 25 bp, Homo sapiens
ataataaacccgcatctgctcacgg

SEQ ID NO: 20195 - DNA, 25 bp, Homo sapiens
cttcaatgcttgggaaccttctccc

SEQ ID NO: 20196 - DNA, 25 bp, Homo sapiens
gaaggacgtggcatccaagctgagc

SEQ ID NO: 20197 - DNA, 25 bp, Homo sapiens
gcatctgcatctgagcttctcaaga

SEQ ID NO: 20198 - DNA, 25 bp, Homo sapiens
gggacctaggagtttgcttctgata

SEQ ID NO: 20199 - DNA, 25 bp, Homo sapiens
gtctcggagattcttgtcctgtttt

SEQ ID NO: 20200 - DNA, 25 bp, Homo sapiens
tcccttcatttctgtggaccttgga

SEQ ID NO: 20201 - DNA, 25 bp, Homo sapiens
tgatagggtcagctttcccatttcc

SEQ ID NO: 20202 - DNA, 25 bp, Homo sapiens
ttcccatttcccttcaatgcttggg

SEQ ID NO: 20203 - DNA, 25 bp, Homo sapiens
aatcctctctcaggcctaactgagc

SEQ ID NO: 20204 - DNA, 25 bp, Homo sapiens
agaagagcgcactgtcttctcagtc

SEQ ID NO: 20205 - DNA, 25 bp, Homo sapiens
atgcctacaaactgattcatgttgg

SEQ ID NO: 20206 - DNA, 25 bp, Homo sapiens
caatgcagactttggagtatctcat

SEQ ID NO: 20207 - DNA, 25 bp, Homo sapiens
gactgacacagagtgaggggcgctg

SEQ ID NO: 20208 - DNA, 25 bp, Homo sapiens
gactgtgatcttacccatgtttgaa

SEQ ID NO: 20209 - DNA, 25 bp, Homo sapiens
ggcctaactgagctgtcatatccaa

SEQ ID NO: 20210 - DNA, 25 bp, Homo sapiens
ggtggtcgttatgacactttctgtg

SEQ ID NO: 20211 - DNA, 25 bp, Homo sapiens
tcacaggaatctgttgggcttctcc

SEQ ID NO: 20212 - DNA, 25 bp, Homo sapiens
tcagtcaacaaggttgcccagccac

SEQ ID NO: 20213 - DNA, 25 bp, Homo sapiens
tttattttcagctgtggcttgtaaa

SEQ ID NO: 20214 - DNA, 25 bp, Homo sapiens
agcaaatatttacccagtcctgact

SEQ ID NO: 20215 - DNA, 25 bp, Homo sapiens
cacatgggacactgttgccttcatt

SEQ ID NO: 20216 - DNA, 25 bp, Homo sapiens
gagtggataacttggccctggaacc

SEQ ID NO: 20217 - DNA, 25 bp, Homo sapiens
gcacgccaagatggctgtgtccaca

SEQ ID NO: 20218 - DNA, 25 bp, Homo sapiens
ggcatcgttctaggagcccaaagat

SEQ ID NO: 20219 - DNA, 25 bp, Homo sapiens
ggcgccatgtgttttaagttgcagc

SEQ ID NO: 20220 - DNA, 25 bp, Homo sapiens
tgaagagccaccagtttttccagtc

SEQ ID NO: 20221 - DNA, 25 bp, Homo sapiens
tgactctgcacatggcatcgttcta

SEQ ID NO: 20222 - DNA, 25 bp, Homo sapiens
tggaggccacggttcaggaagtcct

SEQ ID NO: 20223 - DNA, 25 bp, Homo sapiens
tggtacccacggaggtgctggaacc

SEQ ID NO: 20224 - DNA, 25 bp, Homo sapiens
tgtctcctgcccggtggcagtaaca

SEQ ID NO: 20225 - DNA, 25 bp, Homo sapiens
aaatcgctctgtatagttacaactt

SEQ ID NO: 20226 - DNA, 25 bp, Homo sapiens
aataaacgtgtctgcctttgtgtgt

SEQ ID NO: 20227 - DNA, 25 bp, Homo sapiens
catatgtgtgaaccaaattgtacga

SEQ ID NO: 20228 - DNA, 25 bp, Homo sapiens
gaaaaagttactcaagacagctttc

SEQ ID NO: 20229 - DNA, 25 bp, Homo sapiens
gagaaagtatctatttttggctaaa

SEQ ID NO: 20230 - DNA, 25 bp, Homo sapiens
gtgaggtttgtttgtccggttgatt

SEQ ID NO: 20231 - DNA, 25 bp, Homo sapiens
taagcatgtccgtgtataaatacct

SEQ ID NO: 20232 - DNA, 25 bp, Homo sapiens
tgatcgctgtagtgccttggaagtg

SEQ ID NO: 20233 - DNA, 25 bp, Homo sapiens
tggggggtggagtttcagtgagaat

SEQ ID NO: 20234 - DNA, 25 bp, Homo sapiens
ttacaacttgtaagcatgtccgtgt

SEQ ID NO: 20235 - DNA, 25 bp, Homo sapiens
ttcccgcagctgatcgctgtagtgc

SEQ ID NO: 20236 - DNA, 25 bp, Homo sapiens
aaatctatctgaacctggacgcacc

SEQ ID NO: 20237 - DNA, 25 bp, Homo sapiens
accagttaaacatgcctcttctaca

SEQ ID NO: 20238 - DNA, 25 bp, Homo sapiens
ataccccatttagctccagaaagca

SEQ ID NO: 20239 - DNA, 25 bp, Homo sapiens
atactttcagtatactccatagacc

SEQ ID NO: 20240 - DNA, 25 bp, Homo sapiens
atggtggcagagacatgctggtggc

SEQ ID NO: 20241 - DNA, 25 bp, Homo sapiens
caagagcatgttgggtctcccgtga

SEQ ID NO: 20242 - DNA, 25 bp, Homo sapiens
cccagactgtccgaattgcttttat

SEQ ID NO: 20243 - DNA, 25 bp, Homo sapiens
cccaggggactgtcaggcacagaag

SEQ ID NO: 20244 - DNA, 25 bp, Homo sapiens
tcttctacagctccatttttgatag

SEQ ID NO: 20245 - DNA, 25 bp, Homo sapiens
tgaccgtactaaaatccctttctgt

SEQ ID NO: 20246 - DNA, 25 bp, Homo sapiens
tgcgggcgggagggcaatggtggca

SEQ ID NO: 20247 - DNA, 25 bp, Homo sapiens
aaatggagtgacaccccagactcag

SEQ ID NO: 20248 - DNA, 25 bp, Homo sapiens
aactcatccccagtaacactgcatg

SEQ ID NO: 20249 - DNA, 25 bp, Homo sapiens
acggccctaagcaatagacgcctgc

SEQ ID NO: 20250 - DNA, 25 bp, Homo sapiens
agatgtgcagccagtgcaggtaccc

SEQ ID NO: 20251 - DNA, 25 bp, Homo sapiens
cactcgctggtatttccaggcttgc

SEQ ID NO: 20252 - DNA, 25 bp, Homo sapiens
gacgtttagtatttaattgctcctc

SEQ ID NO: 20253 - DNA, 25 bp, Homo sapiens
gcaggtaccccgggagtgttgcaag

SEQ ID NO: 20254 - DNA, 25 bp, Homo sapiens
gctcctcatgtaacattactctgct

SEQ ID NO: 20255 - DNA, 25 bp, Homo sapiens
tgctaagtactaaccaactcatccc

SEQ ID NO: 20256 - DNA, 25 bp, Homo sapiens
tggctgctgatgatggtgatccctt

SEQ ID NO: 20257 - DNA, 25 bp, Homo sapiens
ttcccaaacactgagaagaccccgc

SEQ ID NO: 20258 - DNA, 25 bp, Homo sapiens
ctctttcatctcattttggcgttgc

SEQ ID NO: 20259 - DNA, 25 bp, Homo sapiens
ggaacgacccacagttacggatact

SEQ ID NO: 20260 - DNA, 25 bp, Homo sapiens
gtaactggttagcttctctggacaa

SEQ ID NO: 20261 - DNA, 25 bp, Homo sapiens
gttgcatctattgtacatcagccct

SEQ ID NO: 20262 - DNA, 25 bp, Homo sapiens
tacggatactcgttctggctcatac

SEQ ID NO: 20263 - DNA, 25 bp, Homo sapiens
tgatgagcgtaacgacccttctgac

SEQ ID NO: 20264 - DNA, 25 bp, Homo sapiens
tgcatccttcgttttttgtgaccat

SEQ ID NO: 20265 - DNA, 25 bp, Homo sapiens
tgtcgctggtctgtgtggtattcaa

SEQ ID NO: 20266 - DNA, 25 bp, Homo sapiens
tgtggcgaacacgcagtccaaccaa

SEQ ID NO: 20267 - DNA, 25 bp, Homo sapiens
ttccaaatgctttacccggcaacca

SEQ ID NO: 20268 - DNA, 25 bp, Homo sapiens
ttctgacctggtctcacgatctgaa

SEQ ID NO: 20269 - DNA, 25 bp, Homo sapiens
aatacctaccttgtagggctgttgt

SEQ ID NO: 20270 - DNA, 25 bp, Homo sapiens
attgactatttacctctgctcattt

SEQ ID NO: 20271 - DNA, 25 bp, Homo sapiens
caagaatgtctagttgcacctcctt

SEQ ID NO: 20272 - DNA, 25 bp, Homo sapiens
caccttggatctaagcagcaccttt

SEQ ID NO: 20273 - DNA, 25 bp, Homo sapiens
ccgcttcaactatgtgacctggggc

SEQ ID NO: 20274 - DNA, 25 bp, Homo sapiens
cctttccgtatgtggcctaaatgcc

SEQ ID NO: 20275 - DNA, 25 bp, Homo sapiens
ctccttccttcagatgttagtctaa

SEQ ID NO: 20276 - DNA, 25 bp, Homo sapiens
gactatggacttacattcactttta

SEQ ID NO: 20277 - DNA, 25 bp, Homo sapiens
ggagttgcattctaatctctctgcc

SEQ ID NO: 20278 - DNA, 25 bp, Homo sapiens
tagtctaaaacagcaccttggatct

SEQ ID NO: 20279 - DNA, 25 bp, Homo sapiens
tataaactctatgagcctctttcct

SEQ ID NO: 20280 - DNA, 25 bp, Homo sapiens
acccacggcttgtaacagtgcgctc

SEQ ID NO: 20281 - DNA, 25 bp, Homo sapiens
agacccacggcttgtaacagtgcgc

SEQ ID NO: 20282 - DNA, 25 bp, Homo sapiens
caggcaggcctcagctgaaacaatg

SEQ ID NO: 20283 - DNA, 25 bp, Homo sapiens
catttagacagacccacggcttgta

SEQ ID NO: 20284 - DNA, 25 bp, Homo sapiens
cccacggacactgagttcctggtga

SEQ ID NO: 20285 - DNA, 25 bp, Homo sapiens
gaaacaatgtcagggtcctcaaggg

SEQ ID NO: 20286 - DNA, 25 bp, Homo sapiens
gcaggcctcagctgaaacaatgtca

SEQ ID NO: 20287 - DNA, 25 bp, Homo sapiens
ggacactgagttcctggtgacagct

SEQ ID NO: 20288 - DNA, 25 bp, Homo sapiens
ggtcccatttagacagacccacggc

SEQ ID NO: 20289 - DNA, 25 bp, Homo sapiens
tagacagacccacggcttgtaacag

SEQ ID NO: 20290 - DNA, 25 bp, Homo sapiens
tcaggaggcagcactagcgcatacc

SEQ ID NO: 20291 - DNA, 25 bp, Homo sapiens
aaatccatcaactaagtccatcagc

SEQ ID NO: 20292 - DNA, 25 bp, Homo sapiens
aactaagtccatcagcagagcttta

SEQ ID NO: 20293 - DNA, 25 bp, Homo sapiens
aatgtttcattgaactacccaattt

SEQ ID NO: 20294 - DNA, 25 bp, Homo sapiens
cactggaccatgttattcctcttga

SEQ ID NO: 20295 - DNA, 25 bp, Homo sapiens
gacacttaccaccttagaataacta

SEQ ID NO: 20296 - DNA, 25 bp, Homo sapiens
gaggttacatactttctgctcacag

SEQ ID NO: 20297 - DNA, 25 bp, Homo sapiens
gtaccttgtgtttcacactggacca

SEQ ID NO: 20298 - DNA, 25 bp, Homo sapiens
gttaactttgtgacacttaccacct

SEQ ID NO: 20299 - DNA, 25 bp, Homo sapiens
gttactttgtgctgtggtttcattg

SEQ ID NO: 20300 - DNA, 25 bp, Homo sapiens
gttgattggatgtgtattctcttta

SEQ ID NO: 20301 - DNA, 25 bp, Homo sapiens
tctgctcacagtttcagttgattgg

SEQ ID NO: 20302 - DNA, 25 bp, Homo sapiens
aaaccagaaggatgctacacccacc

SEQ ID NO: 20303 - DNA, 25 bp, Homo sapiens
aagccaatttgtgcgttcatctctt

SEQ ID NO: 20304 - DNA, 25 bp, Homo sapiens
aaggccagagcagacagacctactg

SEQ ID NO: 20305 - DNA, 25 bp, Homo sapiens
cattcatggagcctgccgtggagtg

SEQ ID NO: 20306 - DNA, 25 bp, Homo sapiens
cccggcctgaatgatgactcttgag

SEQ ID NO: 20307 - DNA, 25 bp, Homo sapiens
gaagctggcagatcccatcaaaggc

SEQ ID NO: 20308 - DNA, 25 bp, Homo sapiens
ggaccaggattccctgatgcgaagc

SEQ ID NO: 20309 - DNA, 25 bp, Homo sapiens
gtccagggacgtcttgatcattaca

SEQ ID NO: 20310 - DNA, 25 bp, Homo sapiens
gttggttttgagttggtctccgcag

SEQ ID NO: 20311 - DNA, 25 bp, Homo sapiens
tccgcaggcaacatcacttctggga

SEQ ID NO: 20312 - DNA, 25 bp, Homo sapiens
tgggatttggtttactggagccttt

SEQ ID NO: 20313 - DNA, 25 bp, Homo sapiens
agagctcaagcttagaagccagccc

SEQ ID NO: 20314 - DNA, 25 bp, Homo sapiens
agcctcctgaaggctcagcacggtg

SEQ ID NO: 20315 - DNA, 25 bp, Homo sapiens
agtagcatttgtacacatggccctg

SEQ ID NO: 20316 - DNA, 25 bp, Homo sapiens
atgccatcaggggcaccttgtcact

SEQ ID NO: 20317 - DNA, 25 bp, Homo sapiens
ctgcaaaatggtcactctgccatct

SEQ ID NO: 20318 - DNA, 25 bp, Homo sapiens
gaagcctaggctgcctcaatggagg

SEQ ID NO: 20319 - DNA, 25 bp, Homo sapiens
ggggaggttgccagatgtgagactt

SEQ ID NO: 20320 - DNA, 25 bp, Homo sapiens
ggttggtggggcaggtcatttggaa

SEQ ID NO: 20321 - DNA, 25 bp, Homo sapiens
tcacccacaattctggccatactta

SEQ ID NO: 20322 - DNA, 25 bp, Homo sapiens
tctgggcaattttggccttgactct

SEQ ID NO: 20323 - DNA, 25 bp, Homo sapiens
tggccctgtattgtccttgaagaac

SEQ ID NO: 20324 - DNA, 25 bp, Homo sapiens
atctggactgctaatatctgacaac

SEQ ID NO: 20325 - DNA, 25 bp, Homo sapiens
ccctcttgacaggccttggtaggca

SEQ ID NO: 20326 - DNA, 25 bp, Homo sapiens
ctttgagcttttgccttcagtctaa

SEQ ID NO: 20327 - DNA, 25 bp, Homo sapiens
gactgggagccaatcactcttgaac

SEQ ID NO: 20328 - DNA, 25 bp, Homo sapiens
gagcttaggctgaccacagggaagt

SEQ ID NO: 20329 - DNA, 25 bp, Homo sapiens
gaggaggccttaaatgctttgagct

SEQ ID NO: 20330 - DNA, 25 bp, Homo sapiens
gagtatggggccctacatgctgtta

SEQ ID NO: 20331 - DNA, 25 bp, Homo sapiens
ggatctcttctaaataacaggcaac

SEQ ID NO: 20332 - DNA, 25 bp, Homo sapiens
ggcaacccctagatccaagtagttc

SEQ ID NO: 20333 - DNA, 25 bp, Homo sapiens
gtatgggggaggaccctcttgacag

SEQ ID NO: 20334 - DNA, 25 bp, Homo sapiens
tcactcttgaaccttgtgggcaaac

SEQ ID NO: 20335 - DNA, 25 bp, Homo sapiens
atggttttcaaactactccacagaa

SEQ ID NO: 20336 - DNA, 25 bp, Homo sapiens
ctccacagaatcctcagggtctctt

SEQ ID NO: 20337 - DNA, 25 bp, Homo sapiens
gaaagggatgcggtgaaggtgggga

SEQ ID NO: 20338 - DNA, 25 bp, Homo sapiens
gaattatatttcccttacatcttgc

SEQ ID NO: 20339 - DNA, 25 bp, Homo sapiens
gagcctttgaacagtcagtcctaag

SEQ ID NO: 20340 - DNA, 25 bp, Homo sapiens
gcagtgaccctggctctgaaaggga

SEQ ID NO: 20341 - DNA, 25 bp, Homo sapiens
gggtctggagacagcatggcttgtc

SEQ ID NO: 20342 - DNA, 25 bp, Homo sapiens
taaagagaaggctgctccctctgtg

SEQ ID NO: 20343 - DNA, 25 bp, Homo sapiens
taggactgttcaagggctcatttgc

SEQ ID NO: 20344 - DNA, 25 bp, Homo sapiens
tcttaagtgccctgctgacagcaaa

SEQ ID NO: 20345 - DNA, 25 bp, Homo sapiens
ttccaccctagtgggtctggagaca

SEQ ID NO: 20346 - DNA, 25 bp, Homo sapiens
agagagagactactgcgcggaagac

SEQ ID NO: 20347 - DNA, 25 bp, Homo sapiens
gaaggaacctgcctaaccaggcacc

SEQ ID NO: 20348 - DNA, 25 bp, Homo sapiens
gagaagaaggtttcccagtgggctt

SEQ ID NO: 20349 - DNA, 25 bp, Homo sapiens
gagaagcttggattttcacctggcc

SEQ ID NO: 20350 - DNA, 25 bp, Homo sapiens
gcggaagaccagactatcgagagct

SEQ ID NO: 20351 - DNA, 25 bp, Homo sapiens
gctctcacagatcggtgtctgggct

SEQ ID NO: 20352 - DNA, 25 bp, Homo sapiens
gcttgctgtgcttggtattttcatc

SEQ ID NO: 20353 - DNA, 25 bp, Homo sapiens
tcaactctcattaaaggtgcttcca

SEQ ID NO: 20354 - DNA, 25 bp, Homo sapiens
tgggctgcaagagcaccaagcacca

SEQ ID NO: 20355 - DNA, 25 bp, Homo sapiens
tgtggtgtttgtctacctgactgtg

SEQ ID NO: 20356 - DNA, 25 bp, Homo sapiens
ttaggaaatcccccaagtcatgtca

SEQ ID NO: 20357 - DNA, 25 bp, Homo sapiens
aaatggttctattctgtgatatatt

SEQ ID NO: 20358 - DNA, 25 bp, Homo sapiens
aaccaagagctgttcggatgattca

SEQ ID NO: 20359 - DNA, 25 bp, Homo sapiens
aatatactcatatgttctttactat

SEQ ID NO: 20360 - DNA, 25 bp, Homo sapiens
cacatccaaaaacggtataacccag

SEQ ID NO: 20361 - DNA, 25 bp, Homo sapiens
ctagtcctgggatgaaatacgatga

SEQ ID NO: 20362 - DNA, 25 bp, Homo sapiens
gaaaggttgtgtgtcctatcaatga

SEQ ID NO: 20363 - DNA, 25 bp, Homo sapiens
ggaaacactcttagtatctcagagt

SEQ ID NO: 20364 - DNA, 25 bp, Homo sapiens
tacgatgactcatgcaaattcaggg

SEQ ID NO: 20365 - DNA, 25 bp, Homo sapiens
tataacccagcttccttaaggcaat

SEQ ID NO: 20366 - DNA, 25 bp, Homo sapiens
tgtatatacgattgtgtgccttgca

SEQ ID NO: 20367 - DNA, 25 bp, Homo sapiens
tttataggtgtttcatctagtcctg

SEQ ID NO: 20368 - DNA, 25 bp, Homo sapiens
acaaccacgggtttggcaactgcgt

SEQ ID NO: 20369 - DNA, 25 bp, Homo sapiens
actggaacgaccagcgctgcaaaac

SEQ ID NO: 20370 - DNA, 25 bp, Homo sapiens
agtggtccaaaaaggctgctctctt

SEQ ID NO: 20371 - DNA, 25 bp, Homo sapiens
catgcctcatgtccaaagaggtctc

SEQ ID NO: 20372 - DNA, 25 bp, Homo sapiens
cttcagctgccttcaactggaacga

SEQ ID NO: 20373 - DNA, 25 bp, Homo sapiens
gaaaccgttacatctgccagtttgc

SEQ ID NO: 20374 - DNA, 25 bp, Homo sapiens
gcatgaaccccacagggtattaaat

SEQ ID NO: 20375 - DNA, 25 bp, Homo sapiens
ggcagctgacaaccacgggtttggc

SEQ ID NO: 20376 - DNA, 25 bp, Homo sapiens
ggtttggcaactgcgtggagctgca

SEQ ID NO: 20377 - DNA, 25 bp, Homo sapiens
gtctcagaccttgcacaatgccaga

SEQ ID NO: 20378 - DNA, 25 bp, Homo sapiens
tcaccagttttgcctttgggcagct

SEQ ID NO: 20379 - DNA, 25 bp, Homo sapiens
agaccacaactgcatgttggattag

SEQ ID NO: 20380 - DNA, 25 bp, Homo sapiens
agctttagaagctattttactacat

SEQ ID NO: 20381 - DNA, 25 bp, Homo sapiens
aggtggctgagcttaattgcttaaa

SEQ ID NO: 20382 - DNA, 25 bp, Homo sapiens
atacttttcctcactttgttgtgca

SEQ ID NO: 20383 - DNA, 25 bp, Homo sapiens
atgttggattagattgtctcatatt

SEQ ID NO: 20384 - DNA, 25 bp, Homo sapiens
cactttgttgtgcactgtaatgaaa

SEQ ID NO: 20385 - DNA, 25 bp, Homo sapiens
ccactcctggcattttctggcaggt

SEQ ID NO: 20386 - DNA, 25 bp, Homo sapiens
ccattgtcactgcaataagtgggtt

SEQ ID NO: 20387 - DNA, 25 bp, Homo sapiens
taaaatgtactgtatacttttcctc

SEQ ID NO: 20388 - DNA, 25 bp, Homo sapiens
taacaaagaccacaactgcatgttg

SEQ ID NO: 20389 - DNA, 25 bp, Homo sapiens
tttcctcactttgttgtgcactgta

SEQ ID NO: 20390 - DNA, 25 bp, Homo sapiens
aacacacttgtatccaccaaatcaa

SEQ ID NO: 20391 - DNA, 25 bp, Homo sapiens
aactttcttgcttttctgtatactt

SEQ ID NO: 20392 - DNA, 25 bp, Homo sapiens
agtaagaaccttctctatcttgtcc

SEQ ID NO: 20393 - DNA, 25 bp, Homo sapiens
cattcaggtgtgttccaatacaagt

SEQ ID NO: 20394 - DNA, 25 bp, Homo sapiens
cccacctaagaggtaaccaccatct

SEQ ID NO: 20395 - DNA, 25 bp, Homo sapiens
cccctttaccactatatacctgaat

SEQ ID NO: 20396 - DNA, 25 bp, Homo sapiens
gcagatagaatgcccctttaccact

SEQ ID NO: 20397 - DNA, 25 bp, Homo sapiens
gtaaccaccatcttgacttttattt

SEQ ID NO: 20398 - DNA, 25 bp, Homo sapiens
gtagtttcttcctgaaccatttgag

SEQ ID NO: 20399 - DNA, 25 bp, Homo sapiens
tagattttagttcggccagtttttg

SEQ ID NO: 20400 - DNA, 25 bp, Homo sapiens
tgtatactttcatcacattcaggtg

SEQ ID NO: 20401 - DNA, 25 bp, Homo sapiens
caatatcgcaggttcttactcctct

SEQ ID NO: 20402 - DNA, 25 bp, Homo sapiens
ccctcgccgacttcggaactggcga

SEQ ID NO: 20403 - DNA, 25 bp, Homo sapiens
ctcaaacccaccaacgatcgggcaa

SEQ ID NO: 20404 - DNA, 25 bp, Homo sapiens
gagatggccctggtagagacctttg

SEQ ID NO: 20405 - DNA, 25 bp, Homo sapiens
gccaccgccactaacggagatggcc

SEQ ID NO: 20406 - DNA, 25 bp, Homo sapiens
gtccagcttaaggtcctcggttaca

SEQ ID NO: 20407 - DNA, 25 bp, Homo sapiens
tacatgcgccgctcagagcaggtca

SEQ ID NO: 20408 - DNA, 25 bp, Homo sapiens
tcctctgcctctataagctcaaacc

SEQ ID NO: 20409 - DNA, 25 bp, Homo sapiens
tccttcaaggaagccccatgtgggt

SEQ ID NO: 20410 - DNA, 25 bp, Homo sapiens
tgagtgcatgcggactgggggttca

SEQ ID NO: 20411 - DNA, 25 bp, Homo sapiens
ttctctgtttttcactcgcaataaa

SEQ ID NO: 20412 - DNA, 25 bp, Homo sapiens
agagcagctgcagtggttgggagga

SEQ ID NO: 20413 - DNA, 25 bp, Homo sapiens
cagtgtgccccaaggagtggagtag

SEQ ID NO: 20414 - DNA, 25 bp, Homo sapiens
ctgacctacgggcttccaagagagc

SEQ ID NO: 20415 - DNA, 25 bp, Homo sapiens
ctggggaccctgccagggaaggcca

SEQ ID NO: 20416 - DNA, 25 bp, Homo sapiens
gaaccctccccaaagaggcagtcag

SEQ ID NO: 20417 - DNA, 25 bp, Homo sapiens
gaagctgtcaatcccggagcaactt

SEQ ID NO: 20418 - DNA, 25 bp, Homo sapiens
gagcccaatctaagtattccttgct

SEQ ID NO: 20419 - DNA, 25 bp, Homo sapiens
ggcagtcaggctgatgctcagtgct

SEQ ID NO: 20420 - DNA, 25 bp, Homo sapiens
gggtgttcacctgcaaagtttctgg

SEQ ID NO: 20421 - DNA, 25 bp, Homo sapiens
ggtcgcgtcatccatgggtattaaa

SEQ ID NO: 20422 - DNA, 25 bp, Homo sapiens
gttgtcactgcacagtggtcgcgtc

SEQ ID NO: 20423 - DNA, 25 bp, Homo sapiens
aataatcacatccaacggcaccagt

SEQ ID NO: 20424 - DNA, 25 bp, Homo sapiens
acatctgtgtgtatctgtacgtgtg

SEQ ID NO: 20425 - DNA, 25 bp, Homo sapiens
attattcaatcatctatccatttat

SEQ ID NO: 20426 - DNA, 25 bp, Homo sapiens
gacaaggacatttactaggggggat

SEQ ID NO: 20427 - DNA, 25 bp, Homo sapiens
gattggctgtgttttgtgtctttta

SEQ ID NO: 20428 - DNA, 25 bp, Homo sapiens
gcaccagttcagctcaactttagaa

SEQ ID NO: 20429 - DNA, 25 bp, Homo sapiens
ggcccaatcggcatcataagcatgt

SEQ ID NO: 20430 - DNA, 25 bp, Homo sapiens
ggttttattgttgatctgtggattt

SEQ ID NO: 20431 - DNA, 25 bp, Homo sapiens
gtgcctaccatgattatgtgctgta

SEQ ID NO: 20432 - DNA, 25 bp, Homo sapiens
taggggggattgtgggcccaatcgg

SEQ ID NO: 20433 - DNA, 25 bp, Homo sapiens
tctgtacgtgtgcacacacccatgt

SEQ ID NO: 20434 - DNA, 25 bp, Homo sapiens
aaaagcgtaatttgcatgtgtgggc

SEQ ID NO: 20435 - DNA, 25 bp, Homo sapiens
aatgttttcataggcactgtataaa

SEQ ID NO: 20436 - DNA, 25 bp, Homo sapiens
caaccaacctacacacaaatgtttt

SEQ ID NO: 20437 - DNA, 25 bp, Homo sapiens
ccagcgcgggaagctcacgctgtgt

SEQ ID NO: 20438 - DNA, 25 bp, Homo sapiens
gattgcttcaaatttctgctactaa

SEQ ID NO: 20439 - DNA, 25 bp, Homo sapiens
gcaaacaactcacttgtcaaatttc

SEQ ID NO: 20440 - DNA, 25 bp, Homo sapiens
gctatgggagtttggcagtagtcac

SEQ ID NO: 20441 - DNA, 25 bp, Homo sapiens
ggaagctcacgctgtgtgaacatga

SEQ ID NO: 20442 - DNA, 25 bp, Homo sapiens
gtgggcataaactacagagcctcat

SEQ ID NO: 20443 - DNA, 25 bp, Homo sapiens
tctgctactaacttcaagctatggg

SEQ ID NO: 20444 - DNA, 25 bp, Homo sapiens
tgaatgctataatgtcccagcgcgg

SEQ ID NO: 20445 - DNA, 25 bp, Homo sapiens
aatacccattatattcctgtaagta

SEQ ID NO: 20446 - DNA, 25 bp, Homo sapiens
actaagactatactcaccaggccat

SEQ ID NO: 20447 - DNA, 25 bp, Homo sapiens
atactcaccaggccatttagaagtt

SEQ ID NO: 20448 - DNA, 25 bp, Homo sapiens
atttttcccttaactcagtgattag

SEQ ID NO: 20449 - DNA, 25 bp, Homo sapiens
ccgggctgcaggttcgtactgaaaa

SEQ ID NO: 20450 - DNA, 25 bp, Homo sapiens
gaatctgccttgactgtatatttca

SEQ ID NO: 20451 - DNA, 25 bp, Homo sapiens
gaattttgttattaatacccattat

SEQ ID NO: 20452 - DNA, 25 bp, Homo sapiens
gatgatacgggatgacatcatttca

SEQ ID NO: 20453 - DNA, 25 bp, Homo sapiens
gtatatttcatactgcccaacaaaa

SEQ ID NO: 20454 - DNA, 25 bp, Homo sapiens
ttaaataatgcctccactatttttt

SEQ ID NO: 20455 - DNA, 25 bp, Homo sapiens
ttacaagtctgtacgaatctgcctt

SEQ ID NO: 20456 - DNA, 25 bp, Homo sapiens
aacagctaagaaaacatgccacatt

SEQ ID NO: 20457 - DNA, 25 bp, Homo sapiens
aatgagtcatcttggggtttttata

SEQ ID NO: 20458 - DNA, 25 bp, Homo sapiens
atgaaatatgccagatctatagtat

SEQ ID NO: 20459 - DNA, 25 bp, Homo sapiens
atttgtttttggtgtaagcacagga

SEQ ID NO: 20460 - DNA, 25 bp, Homo sapiens
cataacacctaacattcataaaaat

SEQ ID NO: 20461 - DNA, 25 bp, Homo sapiens
ggattagttctcttatagtagacag

SEQ ID NO: 20462 - DNA, 25 bp, Homo sapiens
gtagacaggcagctatatgcagcaa

SEQ ID NO: 20463 - DNA, 25 bp, Homo sapiens
gtattttaatgtgcatctactttaa

SEQ ID NO: 20464 - DNA, 25 bp, Homo sapiens
gtgcatctactttaaatgagtcatc

SEQ ID NO: 20465 - DNA, 25 bp, Homo sapiens
ttataattcccttatgttcttgccc

SEQ ID NO: 20466 - DNA, 25 bp, Homo sapiens
ttgcccctctacacttgaaataaca

SEQ ID NO: 20467 - DNA, 25 bp, Homo sapiens
aaaggcatagtctttcagctctatt

SEQ ID NO: 20468 - DNA, 25 bp, Homo sapiens
aatgatcgagtactggtggccactt

SEQ ID NO: 20469 - DNA, 25 bp, Homo sapiens
aattcagcagacacccaactgtatt

SEQ ID NO: 20470 - DNA, 25 bp, Homo sapiens
agaggaggagattccaccttcagaa

SEQ ID NO: 20471 - DNA, 25 bp, Homo sapiens
ctgctggtgtttgccttgtaagata

SEQ ID NO: 20472 - DNA, 25 bp, Homo sapiens
gatgagttgcttggacacagatcag

SEQ ID NO: 20473 - DNA, 25 bp, Homo sapiens
gggaagcattggctttcttcccaca

SEQ ID NO: 20474 - DNA, 25 bp, Homo sapiens
gggtgcacatttctacagatcccct

SEQ ID NO: 20475 - DNA, 25 bp, Homo sapiens
gtctggtttagatggcgagattccg

SEQ ID NO: 20476 - DNA, 25 bp, Homo sapiens
gtctttcagctctattggtgttaaa

SEQ ID NO: 20477 - DNA, 25 bp, Homo sapiens
tggccacttttctccaacattaagt

SEQ ID NO: 20478 - DNA, 25 bp, Homo sapiens
aaatcatatgcgtggtttttcctgt

SEQ ID NO: 20479 - DNA, 25 bp, Homo sapiens
aactgcctcccaggacaagacggag

SEQ ID NO: 20480 - DNA, 25 bp, Homo sapiens
acctaaccctggaagtttgctcgct

SEQ ID NO: 20481 - DNA, 25 bp, Homo sapiens
aggcccaatcaggctaggtctgact

SEQ ID NO: 20482 - DNA, 25 bp, Homo sapiens
caagagttgtcaggaccctgcctct

SEQ ID NO: 20483 - DNA, 25 bp, Homo sapiens
ctttccctcaaagaatcactgcaat

SEQ ID NO: 20484 - DNA, 25 bp, Homo sapiens
gaagctttattggggttccacatat

SEQ ID NO: 20485 - DNA, 25 bp, Homo sapiens
tcccctctgccagttggtgtttatc

SEQ ID NO: 20486 - DNA, 25 bp, Homo sapiens
tctggagtgaccacatcctctaact

SEQ ID NO: 20487 - DNA, 25 bp, Homo sapiens
tgtgaacaatgctcctgaaggcccc

SEQ ID NO: 20488 - DNA, 25 bp, Homo sapiens
tgtttcctgctctgtagctgacatc

SEQ ID NO: 20489 - DNA, 25 bp, Homo sapiens
agcccaggtaaattcctgctggcct

SEQ ID NO: 20490 - DNA, 25 bp, Homo sapiens
caccacctgctatggggagtacctt

SEQ ID NO: 20491 - DNA, 25 bp, Homo sapiens
cactctgtgtttatatcctgtgccc

SEQ ID NO: 20492 - DNA, 25 bp, Homo sapiens
ccatctcctttctagccacaagagt

SEQ ID NO: 20493 - DNA, 25 bp, Homo sapiens
cctcagccccgaggttggtgcaggg

SEQ ID NO: 20494 - DNA, 25 bp, Homo sapiens
gagataattactattccttcccttc

SEQ ID NO: 20495 - DNA, 25 bp, Homo sapiens
gagggaagacttgatcctcagcccc

SEQ ID NO: 20496 - DNA, 25 bp, Homo sapiens
gcccacactgggaagcagcatgccc

SEQ ID NO: 20497 - DNA, 25 bp, Homo sapiens
gttgaccagattgctaccgagtccc

SEQ ID NO: 20498 - DNA, 25 bp, Homo sapiens
tcagcctcaaatccccagtttttga

SEQ ID NO: 20499 - DNA, 25 bp, Homo sapiens
tgagggccctaagagtgtggtctgc

SEQ ID NO: 20500 - DNA, 25 bp, Homo sapiens
aaccatttcagaagattccggccag

SEQ ID NO: 20501 - DNA, 25 bp, Homo sapiens
acttcctgagactgctcgttactaa

SEQ ID NO: 20502 - DNA, 25 bp, Homo sapiens
attcgcgactgaaattcttggctta

SEQ ID NO: 20503 - DNA, 25 bp, Homo sapiens
ccccctctcatctttagaacattta

SEQ ID NO: 20504 - DNA, 25 bp, Homo sapiens
gaacttccagacgaaatcactgcag

SEQ ID NO: 20505 - DNA, 25 bp, Homo sapiens
gacatttccacgagtcaccttgtgg

SEQ ID NO: 20506 - DNA, 25 bp, Homo sapiens
gagctttgaggtgctcggttatacc

SEQ ID NO: 20507 - DNA, 25 bp, Homo sapiens
gattccggccaggatggtcagtgaa

SEQ ID NO: 20508 - DNA, 25 bp, Homo sapiens
gcaacctgctccgtcaaaggttcag

SEQ ID NO: 20509 - DNA, 25 bp, Homo sapiens
gttggattgctttgcttcactgttt

SEQ ID NO: 20510 - DNA, 25 bp, Homo sapiens
tgttttccatgaggcactgcttttt

SEQ ID NO: 20511 - DNA, 25 bp, Homo sapiens
aaaattgactacacagccgacttcc

SEQ ID NO: 20512 - DNA, 25 bp, Homo sapiens
aattttgatttgacactcaggagaa

SEQ ID NO: 20513 - DNA, 25 bp, Homo sapiens
atcctttattagccattttataggt

SEQ ID NO: 20514 - DNA, 25 bp, Homo sapiens
atggccttgtcttggcagggagtaa

SEQ ID NO: 20515 - DNA, 25 bp, Homo sapiens
attccatggccttgtcttggcaggg

SEQ ID NO: 20516 - DNA, 25 bp, Homo sapiens
gaattgtcactgtgaccacaggatg

SEQ ID NO: 20517 - DNA, 25 bp, Homo sapiens
gattacagatcaatttacctccata

SEQ ID NO: 20518 - DNA, 25 bp, Homo sapiens
gggtctcaactgcagcatttcagaa

SEQ ID NO: 20519 - DNA, 25 bp, Homo sapiens
gtctattatgagtactgaatgacca

SEQ ID NO: 20520 - DNA, 25 bp, Homo sapiens
tacctccataaatctttgaattgtc

SEQ ID NO: 20521 - DNA, 25 bp, Homo sapiens
tactttagtgggtctcaactgcagc

SEQ ID NO: 20522 - DNA, 25 bp, Homo sapiens
acacacactctctgctggtaagaaa

SEQ ID NO: 20523 - DNA, 25 bp, Homo sapiens
aggtcaagcccatagacacacactc

SEQ ID NO: 20524 - DNA, 25 bp, Homo sapiens
caacacctgcttggatactaggccc

SEQ ID NO: 20525 - DNA, 25 bp, Homo sapiens
ctgcctggacgcctgaggggcagct

SEQ ID NO: 20526 - DNA, 25 bp, Homo sapiens
gaaaccatagcccagaactgagcca

SEQ ID NO: 20527 - DNA, 25 bp, Homo sapiens
gaattaaaggactggcctttccaga

SEQ ID NO: 20528 - DNA, 25 bp, Homo sapiens
gacagggtaaacagcagggggtggg

SEQ ID NO: 20529 - DNA, 25 bp, Homo sapiens
gggaagtgtgcctgtgagctgaatt

SEQ ID NO: 20530 - DNA, 25 bp, Homo sapiens
ggtggggtgtgagcttggagggccc

SEQ ID NO: 20531 - DNA, 25 bp, Homo sapiens
tgaggggcagcttatcacagtgcaa

SEQ ID NO: 20532 - DNA, 25 bp, Homo sapiens
tttcctccaacacctgcttggatac

SEQ ID NO: 20533 - DNA, 25 bp, Homo sapiens
aaatgcacactattaccgtctttca

SEQ ID NO: 20534 - DNA, 25 bp, Homo sapiens
aacacacccctaaaatttgcactct

SEQ ID NO: 20535 - DNA, 25 bp, Homo sapiens
ataatccagatattgccccatctca

SEQ ID NO: 20536 - DNA, 25 bp, Homo sapiens
gagtcacatatacacctcttgtttt

SEQ ID NO: 20537 - DNA, 25 bp, Homo sapiens
gctgccctgaaatcctggtggggat

SEQ ID NO: 20538 - DNA, 25 bp, Homo sapiens
ggatcacgcttcatcatcaagggga

SEQ ID NO: 20539 - DNA, 25 bp, Homo sapiens
gttttgtctgcaacatcgcttacac

SEQ ID NO: 20540 - DNA, 25 bp, Homo sapiens
tcaccctgcgctatatttccaaagt

SEQ ID NO: 20541 - DNA, 25 bp, Homo sapiens
tgataagctcccagtccttttggaa

SEQ ID NO: 20542 - DNA, 25 bp, Homo sapiens
ttattttcttgctttcacgggtatt

SEQ ID NO: 20543 - DNA, 25 bp, Homo sapiens
ttgcactctcttccgttttgaaaaa

SEQ ID NO: 20544 - DNA, 25 bp, Homo sapiens
agtgaccgttgagaagacccttgtt

SEQ ID NO: 20545 - DNA, 25 bp, Homo sapiens
attactgaagcttttgcctacatct

SEQ ID NO: 20546 - DNA, 25 bp, Homo sapiens
atttcctttgtagcttcaattcctt

SEQ ID NO: 20547 - DNA, 25 bp, Homo sapiens
caacctttcattgttaagtgcctgt

SEQ ID NO: 20548 - DNA, 25 bp, Homo sapiens
ctcaatttggctgctgtacacgtgc

SEQ ID NO: 20549 - DNA, 25 bp, Homo sapiens
gaagcctgttaaaccactgttagtt

SEQ ID NO: 20550 - DNA, 25 bp, Homo sapiens
gccattgtcatatcaaacttgcttt

SEQ ID NO: 20551 - DNA, 25 bp, Homo sapiens
gcctgtattcctttcatttacttca

SEQ ID NO: 20552 - DNA, 25 bp, Homo sapiens
gtacacgtgccagagttttactact

SEQ ID NO: 20553 - DNA, 25 bp, Homo sapiens
tttacttcatgtccaggggtgctat

SEQ ID NO: 20554 - DNA, 25 bp, Homo sapiens
ttttgcctacatcttggtcttttat

SEQ ID NO: 20555 - DNA, 25 bp, Homo sapiens
cagagacttctcattcaatcttgta

SEQ ID NO: 20556 - DNA, 25 bp, Homo sapiens
cttaggatccaattgtgcagtagaa

SEQ ID NO: 20557 - DNA, 25 bp, Homo sapiens
gctccccttgggatttagtagtaga

SEQ ID NO: 20558 - DNA, 25 bp, Homo sapiens
gtgcagtagaattcagagacttctc

SEQ ID NO: 20559 - DNA, 25 bp, Homo sapiens
taaacattggaattttgtcttaaag

SEQ ID NO: 20560 - DNA, 25 bp, Homo sapiens
taagcctcccaatcttaggatccaa

SEQ ID NO: 20561 - DNA, 25 bp, Homo sapiens
tgatgcatcatcacatttaagtaaa

SEQ ID NO: 20562 - DNA, 25 bp, Homo sapiens
tggtaaactgaggttactgatgcat

SEQ ID NO: 20563 - DNA, 25 bp, Homo sapiens
tgtcttaaagagttcaaaaccttgg

SEQ ID NO: 20564 - DNA, 25 bp, Homo sapiens
ttcaatcttgtatcctatgcagcta

SEQ ID NO: 20565 - DNA, 25 bp, Homo sapiens
ttgggctccccttgggatttagtag

SEQ ID NO: 20566 - DNA, 25 bp, Homo sapiens
agggcttctgccattatagggttgt

SEQ ID NO: 20567 - DNA, 25 bp, Homo sapiens
agtcctctggggcacatggtttgag

SEQ ID NO: 20568 - DNA, 25 bp, Homo sapiens
caggggccaaaatgtcccctggctc

SEQ ID NO: 20569 - DNA, 25 bp, Homo sapiens
catggtttgagctctggacttccca

SEQ ID NO: 20570 - DNA, 25 bp, Homo sapiens
gccagctttcttgtctatacagatc

SEQ ID NO: 20571 - DNA, 25 bp, Homo sapiens
gccattcagtactggctctagtccc

SEQ ID NO: 20572 - DNA, 25 bp, Homo sapiens
gctctagtccccgtgagatgtaaag

SEQ ID NO: 20573 - DNA, 25 bp, Homo sapiens
gctctgctccctagggtgattctaa

SEQ ID NO: 20574 - DNA, 25 bp, Homo sapiens
ggaagggtgctagaggcccatcaag

SEQ ID NO: 20575 - DNA, 25 bp, Homo sapiens
gggtgattctaacagcccagggtcc

SEQ ID NO: 20576 - DNA, 25 bp, Homo sapiens
ttgtgccttgctagtcaggggccaa

SEQ ID NO: 20577 - DNA, 25 bp, Homo sapiens
aagtcagagtttaggccaggggcac

SEQ ID NO: 20578 - DNA, 25 bp, Homo sapiens
acttagcattgtgttagacatacta

SEQ ID NO: 20579 - DNA, 25 bp, Homo sapiens
atttcatgtgtgccagtttctcttt

SEQ ID NO: 20580 - DNA, 25 bp, Homo sapiens
attttggtcttatatcttcttatgt

SEQ ID NO: 20581 - DNA, 25 bp, Homo sapiens
gatcacgtgataagcttataatctt

SEQ ID NO: 20582 - DNA, 25 bp, Homo sapiens
ggtgcacagtgaaatacttattgtt

SEQ ID NO: 20583 - DNA, 25 bp, Homo sapiens
gtttaggccaggggcacaggctgac

SEQ ID NO: 20584 - DNA, 25 bp, Homo sapiens
gtttgtgttatttcatgtgtgccag

SEQ ID NO: 20585 - DNA, 25 bp, Homo sapiens
taattccccttacttagcattgtgt

SEQ ID NO: 20586 - DNA, 25 bp, Homo sapiens
tagacatactaataggtgcacagtg

SEQ ID NO: 20587 - DNA, 25 bp, Homo sapiens
tataatcttctcataattcccctta

SEQ ID NO: 20588 - DNA, 25 bp, Homo sapiens
aaagatatggccatcaccaagcccc

SEQ ID NO: 20589 - DNA, 25 bp, Homo sapiens
caatggataccgactgtttcccaca

SEQ ID NO: 20590 - DNA, 25 bp, Homo sapiens
cagcaagttcctaagctgtggccct

SEQ ID NO: 20591 - DNA, 25 bp, Homo sapiens
cccctaggatgacaccagacctgag

SEQ ID NO: 20592 - DNA, 25 bp, Homo sapiens
cctttcactctccacaaatacatta

SEQ ID NO: 20593 - DNA, 25 bp, Homo sapiens
ctgtctaaccactcactgtcatgaa

SEQ ID NO: 20594 - DNA, 25 bp, Homo sapiens
gctagtaagacctgcctttgagttg

SEQ ID NO: 20595 - DNA, 25 bp, Homo sapiens
gtgaccttcgtgaagtcgccaaacc

SEQ ID NO: 20596 - DNA, 25 bp, Homo sapiens
taagcttactcactgacagcctttc

SEQ ID NO: 20597 - DNA, 25 bp, Homo sapiens
tctgagccccagtcattgctagtaa

SEQ ID NO: 20598 - DNA, 25 bp, Homo sapiens
tggatccaagttctgacttttcccc

SEQ ID NO: 20599 - DNA, 25 bp, Homo sapiens
aaagttctcatagtcaaaacagcta

SEQ ID NO: 20600 - DNA, 25 bp, Homo sapiens
aagaccatttcagatttccttagga

SEQ ID NO: 20601 - DNA, 25 bp, Homo sapiens
aagtatttctaatctaggtttgcat

SEQ ID NO: 20602 - DNA, 25 bp, Homo sapiens
aatcctgaccagaatataaatcacc

SEQ ID NO: 20603 - DNA, 25 bp, Homo sapiens
acaaccttgaggctgtgagatcatt

SEQ ID NO: 20604 - DNA, 25 bp, Homo sapiens
cattgcccagactccaaaatcctga

SEQ ID NO: 20605 - DNA, 25 bp, Homo sapiens
gaaacttattcttcaagaccatttc

SEQ ID NO: 20606 - DNA, 25 bp, Homo sapiens
gtacactttttgtgttacttaccat

SEQ ID NO: 20607 - DNA, 25 bp, Homo sapiens
gtgagatcattagtcaattgcttta

SEQ ID NO: 20608 - DNA, 25 bp, Homo sapiens
gtgttacccataattgaccacttca

SEQ ID NO: 20609 - DNA, 25 bp, Homo sapiens
gtttgcatacaaccttgaggctgtg

SEQ ID NO: 20610 - DNA, 25 bp, Homo sapiens
aatcaggaagctggttactggctct

SEQ ID NO: 20611 - DNA, 25 bp, Homo sapiens
aggaagctggttactggctctactg

SEQ ID NO: 20612 - DNA, 25 bp, Homo sapiens
ataccagggtactgcaataccactg

SEQ ID NO: 20613 - DNA, 25 bp, Homo sapiens
gaaagcaggtactttcttattagaa

SEQ ID NO: 20614 - DNA, 25 bp, Homo sapiens
gctggttactggctctactgagagt

SEQ ID NO: 20615 - DNA, 25 bp, Homo sapiens
gtaagcaaacgacagtgcctttaga

SEQ ID NO: 20616 - DNA, 25 bp, Homo sapiens
gtgctgcttttggtaacttatccct

SEQ ID NO: 20617 - DNA, 25 bp, Homo sapiens
tactgcaataccactgtttataagt

SEQ ID NO: 20618 - DNA, 25 bp, Homo sapiens
tatccctttttctcttaagaaagca

SEQ ID NO: 20619 - DNA, 25 bp, Homo sapiens
tctactgagagttggagccctgatg

SEQ ID NO: 20620 - DNA, 25 bp, Homo sapiens
tctgattcttcaaagtcaccctaaa

SEQ ID NO: 20621 - DNA, 25 bp, Homo sapiens
agagggctcccagaagtgtgtggct

SEQ ID NO: 20622 - DNA, 25 bp, Homo sapiens
cctgacagtgtttggctgagccgag

SEQ ID NO: 20623 - DNA, 25 bp, Homo sapiens
cgtgggggccgtgaaggccctgaag

SEQ ID NO: 20624 - DNA, 25 bp, Homo sapiens
ctgagccgagactggagcatctaca

SEQ ID NO: 20625 - DNA, 25 bp, Homo sapiens
gggccctgacagtgtttggctgagc

SEQ ID NO: 20626 - DNA, 25 bp, Homo sapiens
gggctcccagaagtgtgtggctgag

SEQ ID NO: 20627 - DNA, 25 bp, Homo sapiens
tacacctgaggacaagacgctgccc

SEQ ID NO: 20628 - DNA, 25 bp, Homo sapiens
tccccgtgaaccacctcatagaggg

SEQ ID NO: 20629 - DNA, 25 bp, Homo sapiens
tgaaccacctcatagagggctccca

SEQ ID NO: 20630 - DNA, 25 bp, Homo sapiens
tggagcatctacacctgaggacaag

SEQ ID NO: 20631 - DNA, 25 bp, Homo sapiens
tttcttagtgggctcggccaagcct

SEQ ID NO: 20632 - DNA, 25 bp, Homo sapiens
aacatagcctcacattaaatttaat

SEQ ID NO: 20633 - DNA, 25 bp, Homo sapiens
aactgaggctaattttgcaacttca

SEQ ID NO: 20634 - DNA, 25 bp, Homo sapiens
aaggggctgctggaaaactcaatca

SEQ ID NO: 20635 - DNA, 25 bp, Homo sapiens
acctcccaactaacaaacatagcct

SEQ ID NO: 20636 - DNA, 25 bp, Homo sapiens
agccctcattaacgtttgctgcagg

SEQ ID NO: 20637 - DNA, 25 bp, Homo sapiens
atactgccttttgtttagctttttg

SEQ ID NO: 20638 - DNA, 25 bp, Homo sapiens
ggggggactggtttgatttgatgga

SEQ ID NO: 20639 - DNA, 25 bp, Homo sapiens
ggttagttaagacaaagccctcatt

SEQ ID NO: 20640 - DNA, 25 bp, Homo sapiens
gtttaggtacatactgccttttgtt

SEQ ID NO: 20641 - DNA, 25 bp, Homo sapiens
tgttttccttactcagtctaactga

SEQ ID NO: 20642 - DNA, 25 bp, Homo sapiens
ttgcaacttcaataacacttcggag

SEQ ID NO: 20643 - DNA, 25 bp, Homo sapiens
aaggaactggctatccatccatgat

SEQ ID NO: 20644 - DNA, 25 bp, Homo sapiens
catccatgatggatcctgtgtggac

SEQ ID NO: 20645 - DNA, 25 bp, Homo sapiens
gagaactggtacatgctcccaggtg

SEQ ID NO: 20646 - DNA, 25 bp, Homo sapiens
gagagcgaggggatcctagaggtgg

SEQ ID NO: 20647 - DNA, 25 bp, Homo sapiens
gcaagagtacagtttcctagtttgt

SEQ ID NO: 20648 - DNA, 25 bp, Homo sapiens
ggaagccaggactcttggtaggatc

SEQ ID NO: 20649 - DNA, 25 bp, Homo sapiens
ggcttggcatcatcctttagtagac

SEQ ID NO: 20650 - DNA, 25 bp, Homo sapiens
gtctgttccacatgtaaaagtctga

SEQ ID NO: 20651 - DNA, 25 bp, Homo sapiens
tcccttcataccttgcaggatcttt

SEQ ID NO: 20652 - DNA, 25 bp, Homo sapiens
tgtcaagatggacttttcctcatac

SEQ ID NO: 20653 - DNA, 25 bp, Homo sapiens
tgtgtggactgatgggtggcttggc

SEQ ID NO: 20654 - DNA, 25 bp, Homo sapiens
aatgtatttatgtgcctagtgggga

SEQ ID NO: 20655 - DNA, 25 bp, Homo sapiens
agatgggtcttctatacccttctac

SEQ ID NO: 20656 - DNA, 25 bp, Homo sapiens
agccgctaaataaaatctttgcaat

SEQ ID NO: 20657 - DNA, 25 bp, Homo sapiens
agtttctggttttgaggtgttgtag

SEQ ID NO: 20658 - DNA, 25 bp, Homo sapiens
atttgcccttatgcacggaactctg

SEQ ID NO: 20659 - DNA, 25 bp, Homo sapiens
ccctgtggcaggaaatatcccctca

SEQ ID NO: 20660 - DNA, 25 bp, Homo sapiens
gatccagacacctgacctagaatgc

SEQ ID NO: 20661 - DNA, 25 bp, Homo sapiens
gatgataccaagagcagaggcaaca

SEQ ID NO: 20662 - DNA, 25 bp, Homo sapiens
gggaattgcagatgggtcttctata

SEQ ID NO: 20663 - DNA, 25 bp, Homo sapiens
gtgcctagtggggaatccaatatta

SEQ ID NO: 20664 - DNA, 25 bp, Homo sapiens
tccaggtgccggatccagacacctg

SEQ ID NO: 20665 - DNA, 25 bp, Homo sapiens
cccagaccccgtggattctagatag

SEQ ID NO: 20666 - DNA, 25 bp, Homo sapiens
cttcgcttttgctctgagtgaggtg

SEQ ID NO: 20667 - DNA, 25 bp, Homo sapiens
gaaatgcagcgatgctggtgtgcct

SEQ ID NO: 20668 - DNA, 25 bp, Homo sapiens
gaatggcatgcgcaaaggccctgag

SEQ ID NO: 20669 - DNA, 25 bp, Homo sapiens
gagactcagccaaatcctatctggt

SEQ ID NO: 20670 - DNA, 25 bp, Homo sapiens
gaggctgaaatgtgcccatgtgttc

SEQ ID NO: 20671 - DNA, 25 bp, Homo sapiens
ggcacccccaaatttgactctggga

SEQ ID NO: 20672 - DNA, 25 bp, Homo sapiens
gggacttgccctaattcaggtgatc

SEQ ID NO: 20673 - DNA, 25 bp, Homo sapiens
gggtgatatagaggacttcgctttt

SEQ ID NO: 20674 - DNA, 25 bp, Homo sapiens
tagttcccgaaggaccttgtgggtg

SEQ ID NO: 20675 - DNA, 25 bp, Homo sapiens
tgatgtgagctgagacctctgtcct

SEQ ID NO: 20676 - DNA, 25 bp, Homo sapiens
agcgcgcagcaaggaccaggaagat

SEQ ID NO: 20677 - DNA, 25 bp, Homo sapiens
cgacgtcaaggactcgcatccgtcg

SEQ ID NO: 20678 - DNA, 25 bp, Homo sapiens
ctgcagaaaggggcttcttcggtcc

SEQ ID NO: 20679 - DNA, 25 bp, Homo sapiens
gaacaaggtgacatggggagcgcgc

SEQ ID NO: 20680 - DNA, 25 bp, Homo sapiens
gacaacgacgtcaaggactcgcatc

SEQ ID NO: 20681 - DNA, 25 bp, Homo sapiens
gcgattatcgggttcggtaaatgcc

SEQ ID NO: 20682 - DNA, 25 bp, Homo sapiens
gcgcgtcagcgaacttgtctaaatc

SEQ ID NO: 20683 - DNA, 25 bp, Homo sapiens
gctccagtggctgcgattatcgggt

SEQ ID NO: 20684 - DNA, 25 bp, Homo sapiens
gtatatagagtggtttcagattgta

SEQ ID NO: 20685 - DNA, 25 bp, Homo sapiens
tcagattgtaaatagcgcgtcagcg

SEQ ID NO: 20686 - DNA, 25 bp, Homo sapiens
tgacatggggagcgcgcagcaagga

SEQ ID NO: 20687 - DNA, 25 bp, Homo sapiens
aattacaacactgccattttactgt

SEQ ID NO: 20688 - DNA, 25 bp, Homo sapiens
actgccattttactgttgtgtttaa

SEQ ID NO: 20689 - DNA, 25 bp, Homo sapiens
agcacttttcttgttccattcaaac

SEQ ID NO: 20690 - DNA, 25 bp, Homo sapiens
atagcaatagggtctttcctccttt

SEQ ID NO: 20691 - DNA, 25 bp, Homo sapiens
atgttgctgtttttgatagtcactc

SEQ ID NO: 20692 - DNA, 25 bp, Homo sapiens
attccattttgtgcatatgtaccat

SEQ ID NO: 20693 - DNA, 25 bp, Homo sapiens
gaagcttgggctaatagcacttttc

SEQ ID NO: 20694 - DNA, 25 bp, Homo sapiens
gatagtcactcttttaatgaatgta

SEQ ID NO: 20695 - DNA, 25 bp, Homo sapiens
gctaatagcacttttcttgttccat

SEQ ID NO: 20696 - DNA, 25 bp, Homo sapiens
gttgatataattccattttgtgcat

SEQ ID NO: 20697 - DNA, 25 bp, Homo sapiens
tatgtaccattgtgcatgttgctgt

SEQ ID NO: 20698 - DNA, 25 bp, Homo sapiens
aaacttataaatattcccacagata

SEQ ID NO: 20699 - DNA, 25 bp, Homo sapiens
accatttattaagcatttgccatgt

SEQ ID NO: 20700 - DNA, 25 bp, Homo sapiens
acctgtgtgtggcatctacagacct

SEQ ID NO: 20701 - DNA, 25 bp, Homo sapiens
atctactcttcctagaatcaaatat

SEQ ID NO: 20702 - DNA, 25 bp, Homo sapiens
attcccacagatagacaaagtcaag

SEQ ID NO: 20703 - DNA, 25 bp, Homo sapiens
caaagtcaagcataaaactggagct

SEQ ID NO: 20704 - DNA, 25 bp, Homo sapiens
ctgccaaagttatcagctacccata

SEQ ID NO: 20705 - DNA, 25 bp, Homo sapiens
gaagacctccatacaggaagacttg

SEQ ID NO: 20706 - DNA, 25 bp, Homo sapiens
gcactgccaaagttatcagctaccc

SEQ ID NO: 20707 - DNA, 25 bp, Homo sapiens
gtggcatctacagaccttagatcat

SEQ ID NO: 20708 - DNA, 25 bp, Homo sapiens
tgtgtgtggcatctacagaccttag

SEQ ID NO: 20709 - DNA, 25 bp, Homo sapiens
aatactacttttgtggctagcaaag

SEQ ID NO: 20710 - DNA, 25 bp, Homo sapiens
acacctgctctattgattcactatt

SEQ ID NO: 20711 - DNA, 25 bp, Homo sapiens
ccacttcttcctggaatatagctgt

SEQ ID NO: 20712 - DNA, 25 bp, Homo sapiens
gacactactgatgtctgtcatacag

SEQ ID NO: 20713 - DNA, 25 bp, Homo sapiens
gagataagtaacacctgctctattg

SEQ ID NO: 20714 - DNA, 25 bp, Homo sapiens
gcagttattcaggttaatgtttcat

SEQ ID NO: 20715 - DNA, 25 bp, Homo sapiens
gctagcaaaggttgtgcatctattt

SEQ ID NO: 20716 - DNA, 25 bp, Homo sapiens
ggaatatagctgtagtatttctcac

SEQ ID NO: 20717 - DNA, 25 bp, Homo sapiens
gtagttaccttttttcaagctctga

SEQ ID NO: 20718 - DNA, 25 bp, Homo sapiens
gttcagattacgtgttagacttaag

SEQ ID NO: 20719 - DNA, 25 bp, Homo sapiens
tgattcactattacaacaaacccta

SEQ ID NO: 20720 - DNA, 25 bp, Homo sapiens
aaagtgtttgcaatgtccagttata

SEQ ID NO: 20721 - DNA, 25 bp, Homo sapiens
aacttataattcttcacaggtcaca

SEQ ID NO: 20722 - DNA, 25 bp, Homo sapiens
aaggaggtttcttgcatggctaagc

SEQ ID NO: 20723 - DNA, 25 bp, Homo sapiens
aggacctgacaaagctatgaagatt

SEQ ID NO: 20724 - DNA, 25 bp, Homo sapiens
ccttttgctactcgttcagttttag

SEQ ID NO: 20725 - DNA, 25 bp, Homo sapiens
gaaatacaccttttgctactcgttc

SEQ ID NO: 20726 - DNA, 25 bp, Homo sapiens
gaagttgattgttcttccttacaat

SEQ ID NO: 20727 - DNA, 25 bp, Homo sapiens
gacatggatctgggaaatacacctt

SEQ ID NO: 20728 - DNA, 25 bp, Homo sapiens
gcaatgtccagttatatctccatga

SEQ ID NO: 20729 - DNA, 25 bp, Homo sapiens
ggcagaattgggatctgactcacag

SEQ ID NO: 20730 - DNA, 25 bp, Homo sapiens
tatctccatgatattttctttgtgg

SEQ ID NO: 20731 - DNA, 25 bp, Homo sapiens
aaacaatcccactgcttgtaactcc

SEQ ID NO: 20732 - DNA, 25 bp, Homo sapiens
aagatatatgtccttgctttcccat

SEQ ID NO: 20733 - DNA, 25 bp, Homo sapiens
cttgatcacacttaggtctcttgct

SEQ ID NO: 20734 - DNA, 25 bp, Homo sapiens
cttgctttcccatggttcttaagtg

SEQ ID NO: 20735 - DNA, 25 bp, Homo sapiens
gaattcatccgtttacttgtcaaat

SEQ ID NO: 20736 - DNA, 25 bp, Homo sapiens
gaccagacagctttaaatacctact

SEQ ID NO: 20737 - DNA, 25 bp, Homo sapiens
gcttgtaactcctggcagtgtgtac

SEQ ID NO: 20738 - DNA, 25 bp, Homo sapiens
ggtgcatgtcggaaatctcacacta

SEQ ID NO: 20739 - DNA, 25 bp, Homo sapiens
ggtggtttgtgtttctcaaggctga

SEQ ID NO: 20740 - DNA, 25 bp, Homo sapiens
tactctgtcatcactgaacccaatc

SEQ ID NO: 20741 - DNA, 25 bp, Homo sapiens
ttatttccatatgtgtctccatcac

SEQ ID NO: 20742 - DNA, 25 bp, Homo sapiens
accactgaagccgtctgttgaaacc

SEQ ID NO: 20743 - DNA, 25 bp, Homo sapiens
actttcagcctgtccgaattatgta

SEQ ID NO: 20744 - DNA, 25 bp, Homo sapiens
gactgtgggcagtgaatgcgttggg

SEQ ID NO: 20745 - DNA, 25 bp, Homo sapiens
gccgtctgttgaaacctgctgggac

SEQ ID NO: 20746 - DNA, 25 bp, Homo sapiens
gctgggactttttagccattctctt

SEQ ID NO: 20747 - DNA, 25 bp, Homo sapiens
gggagctgccttggaatctacaggg

SEQ ID NO: 20748 - DNA, 25 bp, Homo sapiens
ggggcagagggactatgttgtgagc

SEQ ID NO: 20749 - DNA, 25 bp, Homo sapiens
ggtattcatgcagttcccattttac

SEQ ID NO: 20750 - DNA, 25 bp, Homo sapiens
gtgatgggacaaccactgaagccgt

SEQ ID NO: 20751 - DNA, 25 bp, Homo sapiens
tacaatggtactttcagcctgtccg

SEQ ID NO: 20752 - DNA, 25 bp, Homo sapiens
tttgttgagatctacagcacagcat

SEQ ID NO: 20753 - DNA, 25 bp, Homo sapiens
aagccggcaatgccctggcattttt

SEQ ID NO: 20754 - DNA, 25 bp, Homo sapiens
aatgaatgtcccaaatatcctaaat

SEQ ID NO: 20755 - DNA, 25 bp, Homo sapiens
accttggttccttttacacagatgc

SEQ ID NO: 20756 - DNA, 25 bp, Homo sapiens
agatgctttggttcatgatcctctg

SEQ ID NO: 20757 - DNA, 25 bp, Homo sapiens
ataaactcaaagccggcaatgccct

SEQ ID NO: 20758 - DNA, 25 bp, Homo sapiens
atatgtatcaacaggtatcaacaaa

SEQ ID NO: 20759 - DNA, 25 bp, Homo sapiens
cccatgaacccgaagaaataccttg

SEQ ID NO: 20760 - DNA, 25 bp, Homo sapiens
cccctttccactaggtgagctggaa

SEQ ID NO: 20761 - DNA, 25 bp, Homo sapiens
ctggcatttttgggtcttgagagaa

SEQ ID NO: 20762 - DNA, 25 bp, Homo sapiens
gaatgactgaatttactacaaaggc

SEQ ID NO: 20763 - DNA, 25 bp, Homo sapiens
gagctggaacctgggaaactaatag

SEQ ID NO: 20764 - DNA, 25 bp, Homo sapiens
actgcactaactttgagggccatac

SEQ ID NO: 20765 - DNA, 25 bp, Homo sapiens
actgtagtaattagctgtctggttg

SEQ ID NO: 20766 - DNA, 25 bp, Homo sapiens
agaatccagaactttcagcctgctg

SEQ ID NO: 20767 - DNA, 25 bp, Homo sapiens
agcaaagcatcaactgtgggtacat

SEQ ID NO: 20768 - DNA, 25 bp, Homo sapiens
attattagctactttgttgggcaat

SEQ ID NO: 20769 - DNA, 25 bp, Homo sapiens
attccgtttagcagctgttgggcca

SEQ ID NO: 20770 - DNA, 25 bp, Homo sapiens
atttatggctgcagtttcaactttg

SEQ ID NO: 20771 - DNA, 25 bp, Homo sapiens
cctgctggcagagtctgtctctagc

SEQ ID NO: 20772 - DNA, 25 bp, Homo sapiens
gctactaaagtgctgttccgaagaa

SEQ ID NO: 20773 - DNA, 25 bp, Homo sapiens
gggtacatatgcccagataatgact

SEQ ID NO: 20774 - DNA, 25 bp, Homo sapiens
taaccaagtcaatggccttagtgga

SEQ ID NO: 20775 - DNA, 25 bp, Homo sapiens
agaaaataatgtcaccgccaaaggt

SEQ ID NO: 20776 - DNA, 25 bp, Homo sapiens
agcctggcaatgtaagtgtccttaa

SEQ ID NO: 20777 - DNA, 25 bp, Homo sapiens
aggccgcagatggagtcagaatgtg

SEQ ID NO: 20778 - DNA, 25 bp, Homo sapiens
ccagtattcatggcttcctttctgt

SEQ ID NO: 20779 - DNA, 25 bp, Homo sapiens
cttcctgattttagcctggcaatgt

SEQ ID NO: 20780 - DNA, 25 bp, Homo sapiens
gacacgtcctacaataacaggcgtc

SEQ ID NO: 20781 - DNA, 25 bp, Homo sapiens
gacagacttctgctacggtaattgc

SEQ ID NO: 20782 - DNA, 25 bp, Homo sapiens
gagaagggatctgctttctcttggc

SEQ ID NO: 20783 - DNA, 25 bp, Homo sapiens
gagtcacgttttgtaggatctgttt

SEQ ID NO: 20784 - DNA, 25 bp, Homo sapiens
tcactggatccatctactgttttcc

SEQ ID NO: 20785 - DNA, 25 bp, Homo sapiens
tcttggctgatttcacatagcattg

SEQ ID NO: 20786 - DNA, 25 bp, Homo sapiens
aaatgaacgctcttctatttcttgt

SEQ ID NO: 20787 - DNA, 25 bp, Homo sapiens
acaccctgatcttcaggcgggtctc

SEQ ID NO: 20788 - DNA, 25 bp, Homo sapiens
atcactgccgcctgatggggcaaag

SEQ ID NO: 20789 - DNA, 25 bp, Homo sapiens
attaccaagccaattacttttgcca

SEQ ID NO: 20790 - DNA, 25 bp, Homo sapiens
catttcttactcttctgtgttttaa

SEQ ID NO: 20791 - DNA, 25 bp, Homo sapiens
cgcatggctctcctgagagtggaca

SEQ ID NO: 20792 - DNA, 25 bp, Homo sapiens
ggacaagcgtgggcacaatttcccc

SEQ ID NO: 20793 - DNA, 25 bp, Homo sapiens
tatcaaagcgggctgggtcccatca

SEQ ID NO: 20794 - DNA, 25 bp, Homo sapiens
tcagaacgacccacatctttctgtg

SEQ ID NO: 20795 - DNA, 25 bp, Homo sapiens
tcaggcgggtctcaggagcttctaa

SEQ ID NO: 20796 - DNA, 25 bp, Homo sapiens
tgtcattaggtcttgcgctgacccc

SEQ ID NO: 20797 - DNA, 25 bp, Homo sapiens
aaggccctgtgagtctatgaagcgg

SEQ ID NO: 20798 - DNA, 25 bp, Homo sapiens
aatcatcctactggtatctaactcc

SEQ ID NO: 20799 - DNA, 25 bp, Homo sapiens
agctgatactgtttctctaaggtgg

SEQ ID NO: 20800 - DNA, 25 bp, Homo sapiens
agggattagatccgagccacattac

SEQ ID NO: 20801 - DNA, 25 bp, Homo sapiens
atctaactccagggcctacgttaat

SEQ ID NO: 20802 - DNA, 25 bp, Homo sapiens
gaacacccttgttaatagtttagct

SEQ ID NO: 20803 - DNA, 25 bp, Homo sapiens
gaatggtctgtcaggaacacccttg

SEQ ID NO: 20804 - DNA, 25 bp, Homo sapiens
gatcttgcttggagaggcaccatct

SEQ ID NO: 20805 - DNA, 25 bp, Homo sapiens
gcaccatctgcctacagggattaga

SEQ ID NO: 20806 - DNA, 25 bp, Homo sapiens
taaaggaccagatcttttaccacct

SEQ ID NO: 20807 - DNA, 25 bp, Homo sapiens
tcctctataacatcatttccctagg

SEQ ID NO: 20808 - DNA, 25 bp, Homo sapiens
accacaaggccggcaagcatcaatg

SEQ ID NO: 20809 - DNA, 25 bp, Homo sapiens
agatctctatccacttttattgaaa

SEQ ID NO: 20810 - DNA, 25 bp, Homo sapiens
caagcctgtatgcataattcccgga

SEQ ID NO: 20811 - DNA, 25 bp, Homo sapiens
ctccccctgaaatgtaccgatttat

SEQ ID NO: 20812 - DNA, 25 bp, Homo sapiens
gaccacagaacatctgcataggctg

SEQ ID NO: 20813 - DNA, 25 bp, Homo sapiens
gagctgtcttattaccacaaggccg

SEQ ID NO: 20814 - DNA, 25 bp, Homo sapiens
gcataggctgtaaatttcgttgaat

SEQ ID NO: 20815 - DNA, 25 bp, Homo sapiens
ggatgagttagtactgctgcctgtg

SEQ ID NO: 20816 - DNA, 25 bp, Homo sapiens
taagccctgtccctgatatgaaaga

SEQ ID NO: 20817 - DNA, 25 bp, Homo sapiens
tggagttttccagttcatcagccat

SEQ ID NO: 20818 - DNA, 25 bp, Homo sapiens
ttcccccaatctatattacttcaga

SEQ ID NO: 20819 - DNA, 25 bp, Homo sapiens
aggcgtgcaaacagagcgccactgg

SEQ ID NO: 20820 - DNA, 25 bp, Homo sapiens
caagacgctgtctctatttatacaa

SEQ ID NO: 20821 - DNA, 25 bp, Homo sapiens
gaacagcgatgttgtgcgcccattt

SEQ ID NO: 20822 - DNA, 25 bp, Homo sapiens
gagaccaggagtgatggctcagcct

SEQ ID NO: 20823 - DNA, 25 bp, Homo sapiens
gaggctgaaacctttaggccgatgc

SEQ ID NO: 20824 - DNA, 25 bp, Homo sapiens
gcgcccatttctcagatcaaggacc

SEQ ID NO: 20825 - DNA, 25 bp, Homo sapiens
ggctcagcctgtaattctggaattt

SEQ ID NO: 20826 - DNA, 25 bp, Homo sapiens
ggtcgacctaaggcgtgcaaacaga

SEQ ID NO: 20827 - DNA, 25 bp, Homo sapiens
gtcaggcaagctggattctggtccc

SEQ ID NO: 20828 - DNA, 25 bp, Homo sapiens
tactacctccaagagtgcttttctc

SEQ ID NO: 20829 - DNA, 25 bp, Homo sapiens
ttgaaacatctactgggcgagacca

SEQ ID NO: 20830 - DNA, 25 bp, Homo sapiens
acagcccatgggaatgccctgaaac

SEQ ID NO: 20831 - DNA, 25 bp, Homo sapiens
acttatttaaatgacagcacctgag

SEQ ID NO: 20832 - DNA, 25 bp, Homo sapiens
agaggaaccgttttacactggatgt

SEQ ID NO: 20833 - DNA, 25 bp, Homo sapiens
cgatgaggttccatgttttgttttc

SEQ ID NO: 20834 - DNA, 25 bp, Homo sapiens
gagcatagtgtttgggctagtgggt

SEQ ID NO: 20835 - DNA, 25 bp, Homo sapiens
gatagcgaatgcactcagggtcagc

SEQ ID NO: 20836 - DNA, 25 bp, Homo sapiens
gatgtttgttttcgatgaggttcca

SEQ ID NO: 20837 - DNA, 25 bp, Homo sapiens
gctagtgggtttctgacagcccatg

SEQ ID NO: 20838 - DNA, 25 bp, Homo sapiens
ggaatgccctgaaactactgtatct

SEQ ID NO: 20839 - DNA, 25 bp, Homo sapiens
gtcatctctcctgtgtcttaaatac

SEQ ID NO: 20840 - DNA, 25 bp, Homo sapiens
tacatgtctgttgttggtcatctct

SEQ ID NO: 20841 - DNA, 25 bp, Homo sapiens
cagatgcctgaaaggcctccatggc

SEQ ID NO: 20842 - DNA, 25 bp, Homo sapiens
cctgatgcagccgcagcgtcaagga

SEQ ID NO: 20843 - DNA, 25 bp, Homo sapiens
cggggacctcgtgtgacaggtgagc

SEQ ID NO: 20844 - DNA, 25 bp, Homo sapiens
cggggagggctggacatgtggaacc

SEQ ID NO: 20845 - DNA, 25 bp, Homo sapiens
ctcggggacctcgtgtgacaggtga

SEQ ID NO: 20846 - DNA, 25 bp, Homo sapiens
gcagccgcagcgtcaaggacgagga

SEQ ID NO: 20847 - DNA, 25 bp, Homo sapiens
gcgtcaaggacgaggaaggggtggg

SEQ ID NO: 20848 - DNA, 25 bp, Homo sapiens
gctggacatgtggaaccctgatgca

SEQ ID NO: 20849 - DNA, 25 bp, Homo sapiens
tgcctgaaaggcctccatggctttc

SEQ ID NO: 20850 - DNA, 25 bp, Homo sapiens
tggttccggacagctggggaaaggc

SEQ ID NO: 20851 - DNA, 25 bp, Homo sapiens
ttcctggttccggacagctggggaa

SEQ ID NO: 20852 - DNA, 25 bp, Homo sapiens
accccgttcctgaacatcgacaaat

SEQ ID NO: 20853 - DNA, 25 bp, Homo sapiens
caactgggatgcctttcctaagctg

SEQ ID NO: 20854 - DNA, 25 bp, Homo sapiens
cacgccctctttgagtctatcaaaa

SEQ ID NO: 20855 - DNA, 25 bp, Homo sapiens
gactgaggagcgcaactcctgatgc

SEQ ID NO: 20856 - DNA, 25 bp, Homo sapiens
gcgatctgcgtttaaggctgatgag

SEQ ID NO: 20857 - DNA, 25 bp, Homo sapiens
ggaagagggggctagcgtgagcgct

SEQ ID NO: 20858 - DNA, 25 bp, Homo sapiens
taactctttcctgcctcaggaactc

SEQ ID NO: 20859 - DNA, 25 bp, Homo sapiens
tagcgtgagcgctgattctcaacct

SEQ ID NO: 20860 - DNA, 25 bp, Homo sapiens
tcgacaaattgcgatctgcgtttaa

SEQ ID NO: 20861 - DNA, 25 bp, Homo sapiens
tgagaattatgcgtcacgacccgag

SEQ ID NO: 20862 - DNA, 25 bp, Homo sapiens
tgatgagttcctgaactggcacgcc

SEQ ID NO: 20863 - DNA, 25 bp, Homo sapiens
acactttcccatagcaaatagcata

SEQ ID NO: 20864 - DNA, 25 bp, Homo sapiens
atggcaggaatatacactttcccat

SEQ ID NO: 20865 - DNA, 25 bp, Homo sapiens
gagtgctgactgtaattactttgat

SEQ ID NO: 20866 - DNA, 25 bp, Homo sapiens
gcaaatagcatacctgactctctgt

SEQ ID NO: 20867 - DNA, 25 bp, Homo sapiens
gcacaacaggaaccatggcaggaat

SEQ ID NO: 20868 - DNA, 25 bp, Homo sapiens
gcctcctgagtggttggggttacgg

SEQ ID NO: 20869 - DNA, 25 bp, Homo sapiens
tagcatacctgactctctgtgctaa

SEQ ID NO: 20870 - DNA, 25 bp, Homo sapiens
tagtgggtatagtctgcacaacagg

SEQ ID NO: 20871 - DNA, 25 bp, Homo sapiens
tgctgatattttgagtgctgactgt

SEQ ID NO: 20872 - DNA, 25 bp, Homo sapiens
ttccagctctcctcttaaatagtgg

SEQ ID NO: 20873 - DNA, 25 bp, Homo sapiens
ttttattccagagttctcaaaatat

SEQ ID NO: 20874 - DNA, 25 bp, Homo sapiens
aaacacatgaagctctgggtcctag

SEQ ID NO: 20875 - DNA, 25 bp, Homo sapiens
aaagctgtggatcatctcctaggaa

SEQ ID NO: 20876 - DNA, 25 bp, Homo sapiens
acaactgtcataatcctgaaatcca

SEQ ID NO: 20877 - DNA, 25 bp, Homo sapiens
agggatccaacataactcagacata

SEQ ID NO: 20878 - DNA, 25 bp, Homo sapiens
gaacacaacatacactgtcaaactt

SEQ ID NO: 20879 - DNA, 25 bp, Homo sapiens
gagcaaactgtcactaaacttggat

SEQ ID NO: 20880 - DNA, 25 bp, Homo sapiens
ggaagattccctatttaaacacatg

SEQ ID NO: 20881 - DNA, 25 bp, Homo sapiens
ggttataagccctttgagaatctga

SEQ ID NO: 20882 - DNA, 25 bp, Homo sapiens
gtagcctgtttctaacacaactgtc

SEQ ID NO: 20883 - DNA, 25 bp, Homo sapiens
gtcaaactttacatcagggatccaa

SEQ ID NO: 20884 - DNA, 25 bp, Homo sapiens
taataaagtcgtacctctaatgttc

SEQ ID NO: 20885 - DNA, 25 bp, Homo sapiens
aaacgacttctgctattcttactta

SEQ ID NO: 20886 - DNA, 25 bp, Homo sapiens
acctcagtctaagagctggctccac

SEQ ID NO: 20887 - DNA, 25 bp, Homo sapiens
atttgtctgtttttctgcattggca

SEQ ID NO: 20888 - DNA, 25 bp, Homo sapiens
cagtgatagcacctcatgtcttcag

SEQ ID NO: 20889 - DNA, 25 bp, Homo sapiens
gaaacacccaatgttcagaccttac

SEQ ID NO: 20890 - DNA, 25 bp, Homo sapiens
gacaccaaggacattcagattttct

SEQ ID NO: 20891 - DNA, 25 bp, Homo sapiens
gagttaagcacgaactcctttcttt

SEQ ID NO: 20892 - DNA, 25 bp, Homo sapiens
gcaatggccctgttaggcagactgt

SEQ ID NO: 20893 - DNA, 25 bp, Homo sapiens
gctggctccacagttggtagcaatg

SEQ ID NO: 20894 - DNA, 25 bp, Homo sapiens
ggtttgcttcatctatcctaagtgg

SEQ ID NO: 20895 - DNA, 25 bp, Homo sapiens
tttctttcctatacctattttcata

SEQ ID NO: 20896 - DNA, 25 bp, Homo sapiens
agcaattaaaactcttctgcttcag

SEQ ID NO: 20897 - DNA, 25 bp, Homo sapiens
aggctcctaagatagagtagctggt

SEQ ID NO: 20898 - DNA, 25 bp, Homo sapiens
atttcagtgcagtgtcactctcatt

SEQ ID NO: 20899 - DNA, 25 bp, Homo sapiens
cagatgatggacttgtctttccacc

SEQ ID NO: 20900 - DNA, 25 bp, Homo sapiens
cttcctcttccctcttgagagaaaa

SEQ ID NO: 20901 - DNA, 25 bp, Homo sapiens
ggctctggaataactgacaacatat

SEQ ID NO: 20902 - DNA, 25 bp, Homo sapiens
ggtttggagcattgtacctccagcc

SEQ ID NO: 20903 - DNA, 25 bp, Homo sapiens
gtacctccagccatagactctaagg

SEQ ID NO: 20904 - DNA, 25 bp, Homo sapiens
tattctgccaattatctcacatttc

SEQ ID NO: 20905 - DNA, 25 bp, Homo sapiens
ttctgtctccttgtatctaattgca

SEQ ID NO: 20906 - DNA, 25 bp, Homo sapiens
tttccacctctcatttgcatggttt

SEQ ID NO: 20907 - DNA, 25 bp, Homo sapiens
acttcatgtagcagcctaacaccgg

SEQ ID NO: 20908 - DNA, 25 bp, Homo sapiens
agaaactgtgacaaatccattgatc

SEQ ID NO: 20909 - DNA, 25 bp, Homo sapiens
agtgttaggctcatttcttttagaa

SEQ ID NO: 20910 - DNA, 25 bp, Homo sapiens
atatacctctagaatgccacgtgtt

SEQ ID NO: 20911 - DNA, 25 bp, Homo sapiens
gaatgccacgtgttctgttggggat

SEQ ID NO: 20912 - DNA, 25 bp, Homo sapiens
gagccaattatttcaggtgttctaa

SEQ ID NO: 20913 - DNA, 25 bp, Homo sapiens
gccgagttgcctttactctattttc

SEQ ID NO: 20914 - DNA, 25 bp, Homo sapiens
gcctttactctattttctatgatga

SEQ ID NO: 20915 - DNA, 25 bp, Homo sapiens
gtgtagagttaatacccactaggga

SEQ ID NO: 20916 - DNA, 25 bp, Homo sapiens
tgttggagtcttgttgattctctat

SEQ ID NO: 20917 - DNA, 25 bp, Homo sapiens
ttttattacctcatatacctctaga

SEQ ID NO: 20918 - DNA, 25 bp, Homo sapiens
aagaggtgtttatggccaaccccat

SEQ ID NO: 20919 - DNA, 25 bp, Homo sapiens
acggcgtgcacccagtagaggtggc

SEQ ID NO: 20920 - DNA, 25 bp, Homo sapiens
aggagaagctcaatgtcccggagga

SEQ ID NO: 20921 - DNA, 25 bp, Homo sapiens
ccgtggtggcctgtggggtgaagga

SEQ ID NO: 20922 - DNA, 25 bp, Homo sapiens
ctcccggagaacaggccaaatcgtg

SEQ ID NO: 20923 - DNA, 25 bp, Homo sapiens
gactgcctccgagccgaagtggagg

SEQ ID NO: 20924 - DNA, 25 bp, Homo sapiens
gcggaggaggtgatgcgcaccgtgc

SEQ ID NO: 20925 - DNA, 25 bp, Homo sapiens
gtcgtaccacgtgtatccagagcaa

SEQ ID NO: 20926 - DNA, 25 bp, Homo sapiens
tacgatgttgtcatcagcaccgtga

SEQ ID NO: 20927 - DNA, 25 bp, Homo sapiens
tgcaggaggccaaatgggccacccc

SEQ ID NO: 20928 - DNA, 25 bp, Homo sapiens
ttcaggaagctgacctacggcgtgc

SEQ ID NO: 20929 - DNA, 25 bp, Homo sapiens
aaagggctctcagacatcttgggtc

SEQ ID NO: 20930 - DNA, 25 bp, Homo sapiens
aacacaggcttcagattcatgtatt

SEQ ID NO: 20931 - DNA, 25 bp, Homo sapiens
atgatgttgttctcttatcacctct

SEQ ID NO: 20932 - DNA, 25 bp, Homo sapiens
cagggacaaagggctctcagacatc

SEQ ID NO: 20933 - DNA, 25 bp, Homo sapiens
cccctcacctctgtgaattatcatg

SEQ ID NO: 20934 - DNA, 25 bp, Homo sapiens
gatccaagtctaagatgtttccggt

SEQ ID NO: 20935 - DNA, 25 bp, Homo sapiens
gatgctattaatgttattttgccaa

SEQ ID NO: 20936 - DNA, 25 bp, Homo sapiens
ggtgacagagtagcatgcctccaag

SEQ ID NO: 20937 - DNA, 25 bp, Homo sapiens
gtgggctttgaacgggatccaagtc

SEQ ID NO: 20938 - DNA, 25 bp, Homo sapiens
tgtccccgagttgattcactgtgca

SEQ ID NO: 20939 - DNA, 25 bp, Homo sapiens
tttccggtgagctgccagggacaaa

SEQ ID NO: 20940 - DNA, 25 bp, Homo sapiens
agaactactagcttttccacttaga

SEQ ID NO: 20941 - DNA, 25 bp, Homo sapiens
agagtattcaggtctcctcttgtga

SEQ ID NO: 20942 - DNA, 25 bp, Homo sapiens
agatggcccaaggaagcacatcgtc

SEQ ID NO: 20943 - DNA, 25 bp, Homo sapiens
atggcatctctttctatgtttggtt

SEQ ID NO: 20944 - DNA, 25 bp, Homo sapiens
ccactccaccatgctattaagactc

SEQ ID NO: 20945 - DNA, 25 bp, Homo sapiens
gaccaaatgttggacagccctatta

SEQ ID NO: 20946 - DNA, 25 bp, Homo sapiens
gcaacaagtcttatcatggcatctc

SEQ ID NO: 20947 - DNA, 25 bp, Homo sapiens
gctttgtatagctgtcctagactgc

SEQ ID NO: 20948 - DNA, 25 bp, Homo sapiens
ggatccctacatgaataagtcctgt

SEQ ID NO: 20949 - DNA, 25 bp, Homo sapiens
gtcctagactgcagaaatgtcctct

SEQ ID NO: 20950 - DNA, 25 bp, Homo sapiens
gtctggcatcgttaactacatagtg

SEQ ID NO: 20951 - DNA, 25 bp, Homo sapiens
accggactgagatggcacccggggc

SEQ ID NO: 20952 - DNA, 25 bp, Homo sapiens
atctggacctctaagtcattcccaa

SEQ ID NO: 20953 - DNA, 25 bp, Homo sapiens
cccagacacgtctccttgggattca

SEQ ID NO: 20954 - DNA, 25 bp, Homo sapiens
cctacacagcagtctggcctgagac

SEQ ID NO: 20955 - DNA, 25 bp, Homo sapiens
ctaccagcgcttcgaccgaattaac

SEQ ID NO: 20956 - DNA, 25 bp, Homo sapiens
gacttatctgtggagcctggtgctc

SEQ ID NO: 20957 - DNA, 25 bp, Homo sapiens
gcctgagacgtcactggggacttat

SEQ ID NO: 20958 - DNA, 25 bp, Homo sapiens
tactggagttcttcatcacacttgc

SEQ ID NO: 20959 - DNA, 25 bp, Homo sapiens
tccatctttgcctatgatgccttca

SEQ ID NO: 20960 - DNA, 25 bp, Homo sapiens
tgccttcaagatctaccggactgag

SEQ ID NO: 20961 - DNA, 25 bp, Homo sapiens
tgctccaggatgtggcttctcatga

SEQ ID NO: 20962 - DNA, 25 bp, Homo sapiens
atcttcacatttttacaccttggga

SEQ ID NO: 20963 - DNA, 25 bp, Homo sapiens
ctcctcgacattcagtttaccttaa

SEQ ID NO: 20964 - DNA, 25 bp, Homo sapiens
gcaagcatcgctgggtttaagataa

SEQ ID NO: 20965 - DNA, 25 bp, Homo sapiens
gcattctggaatgagcctacttcaa

SEQ ID NO: 20966 - DNA, 25 bp, Homo sapiens
gttaatgtaaatttctcatcctcga

SEQ ID NO: 20967 - DNA, 25 bp, Homo sapiens
tattttcaattccagtatatcactt

SEQ ID NO: 20968 - DNA, 25 bp, Homo sapiens
tgcccccagaggctttttggatgtt

SEQ ID NO: 20969 - DNA, 25 bp, Homo sapiens
tgtgttttgccatctctttacactc

SEQ ID NO: 20970 - DNA, 25 bp, Homo sapiens
ttcagtttaccttaatcttcacatt

SEQ ID NO: 20971 - DNA, 25 bp, Homo sapiens
ttgaatcataagcttgacctgcccc

SEQ ID NO: 20972 - DNA, 25 bp, Homo sapiens
tttatctgtgttttgccatctcttt

SEQ ID NO: 20973 - DNA, 25 bp, Homo sapiens
actactatacggctgcgagaagacg

SEQ ID NO: 20974 - DNA, 25 bp, Homo sapiens
agggacccaatgctaataaagactg

SEQ ID NO: 20975 - DNA, 25 bp, Homo sapiens
atacggctgcgagaagacgacagaa

SEQ ID NO: 20976 - DNA, 25 bp, Homo sapiens
ctactactactatacggctgcgaga

SEQ ID NO: 20977 - DNA, 25 bp, Homo sapiens
gacgacagaaggggtgggaagggat

SEQ ID NO: 20978 - DNA, 25 bp, Homo sapiens
gaggggaatgggtggtgggaccagg

SEQ ID NO: 20979 - DNA, 25 bp, Homo sapiens
gggaccagggacccaatgctaataa

SEQ ID NO: 20980 - DNA, 25 bp, Homo sapiens
gggatggtacgtggaggggaatggg

SEQ ID NO: 20981 - DNA, 25 bp, Homo sapiens
ggtgggaccagggacccaatgctaa

SEQ ID NO: 20982 - DNA, 25 bp, Homo sapiens
ggtggtgggaccagggacccaatgc

SEQ ID NO: 20983 - DNA, 25 bp, Homo sapiens
tgggaagggatggtacgtggagggg

SEQ ID NO: 20984 - DNA, 25 bp, Homo sapiens
aaattacgcagctagtcctgggctt

SEQ ID NO: 20985 - DNA, 25 bp, Homo sapiens
atccattgctcagacaggtagacat

SEQ ID NO: 20986 - DNA, 25 bp, Homo sapiens
atgtttctaatccattgctcagaca

SEQ ID NO: 20987 - DNA, 25 bp, Homo sapiens
cagcttcgttattctctacttgaga

SEQ ID NO: 20988 - DNA, 25 bp, Homo sapiens
gaaattgggcaggatctctcttgat

SEQ ID NO: 20989 - DNA, 25 bp, Homo sapiens
gatcatatccctagacttttagtct

SEQ ID NO: 20990 - DNA, 25 bp, Homo sapiens
ggagcatgagatccagcttcgttat

SEQ ID NO: 20991 - DNA, 25 bp, Homo sapiens
ggatattgcttgttagtgtcagaac

SEQ ID NO: 20992 - DNA, 25 bp, Homo sapiens
tagacttttagtctgctttctcttc

SEQ ID NO: 20993 - DNA, 25 bp, Homo sapiens
tgagccccacaaattacgcagctag

SEQ ID NO: 20994 - DNA, 25 bp, Homo sapiens
tgggctattatctaatgctgtgtag

SEQ ID NO: 20995 - DNA, 25 bp, Homo sapiens
aaaccatctgtgtaacctgaacctc

SEQ ID NO: 20996 - DNA, 25 bp, Homo sapiens
aacgcacttaggatttgtcgtcagt

SEQ ID NO: 20997 - DNA, 25 bp, Homo sapiens
atcacagttaatctttgcacaatgc

SEQ ID NO: 20998 - DNA, 25 bp, Homo sapiens
atgtgttcactttttagcaagctaa

SEQ ID NO: 20999 - DNA, 25 bp, Homo sapiens
gagcggtctgggatagagcctgaac

SEQ ID NO: 21000 - DNA, 25 bp, Homo sapiens
gcaagctaagctgctccttatttct

SEQ ID NO: 21001 - DNA, 25 bp, Homo sapiens
gcacaatgcatcgcattctccatgc

SEQ ID NO: 21002 - DNA, 25 bp, Homo sapiens
gctccttatttctcctgtagtagac

SEQ ID NO: 21003 - DNA, 25 bp, Homo sapiens
tatgtaagatatggcctctgctctc

SEQ ID NO: 21004 - DNA, 25 bp, Homo sapiens
ttctccatgcaacctaacagagcgg

SEQ ID NO: 21005 - DNA, 25 bp, Homo sapiens
ttggggcccaacaggcaaggttcag

SEQ ID NO: 21006 - DNA, 25 bp, Homo sapiens
ataaaacagcactccctaacaatta

SEQ ID NO: 21007 - DNA, 25 bp, Homo sapiens
atataagccctaatttctgtgtatg

SEQ ID NO: 21008 - DNA, 25 bp, Homo sapiens
atcaatgtttatgaagttccctcct

SEQ ID NO: 21009 - DNA, 25 bp, Homo sapiens
atgtattcttattggcctgtagagg

SEQ ID NO: 21010 - DNA, 25 bp, Homo sapiens
attcccggataatgcacacatgatt

SEQ ID NO: 21011 - DNA, 25 bp, Homo sapiens
catgatttctgaatgttttctgtaa

SEQ ID NO: 21012 - DNA, 25 bp, Homo sapiens
gaagttccctcctttaatgctgaac

SEQ ID NO: 21013 - DNA, 25 bp, Homo sapiens
gtaaaactgcagcctgagtcattta

SEQ ID NO: 21014 - DNA, 25 bp, Homo sapiens
gttcaatactgttagcattcccgga

SEQ ID NO: 21015 - DNA, 25 bp, Homo sapiens
gtttttgtccttattttatgtcctg

SEQ ID NO: 21016 - DNA, 25 bp, Homo sapiens
tcaccattgatttttctggagttta

SEQ ID NO: 21017 - DNA, 25 bp, Homo sapiens
acaactttagtgatcattatgttct

SEQ ID NO: 21018 - DNA, 25 bp, Homo sapiens
acaggctatgcttgtagtttctcat

SEQ ID NO: 21019 - DNA, 25 bp, Homo sapiens
actgattgaaagcttattccataga

SEQ ID NO: 21020 - DNA, 25 bp, Homo sapiens
gaagacattgggttctagagactta

SEQ ID NO: 21021 - DNA, 25 bp, Homo sapiens
gaaggtgaggttatttgtgtgaaga

SEQ ID NO: 21022 - DNA, 25 bp, Homo sapiens
gaatggttaggatcagtttgtttac

SEQ ID NO: 21023 - DNA, 25 bp, Homo sapiens
gacaggcatctgatggtaataccaa

SEQ ID NO: 21024 - DNA, 25 bp, Homo sapiens
ggagaacactaacaagacaggcatc

SEQ ID NO: 21025 - DNA, 25 bp, Homo sapiens
ggttctagagacttacaggctatgc

SEQ ID NO: 21026 - DNA, 25 bp, Homo sapiens
tagtctgaacctgggtacagaagag

SEQ ID NO: 21027 - DNA, 25 bp, Homo sapiens
tttctcatatttaccttccttttgt

SEQ ID NO: 21028 - DNA, 25 bp, Homo sapiens
aaaaagcttatgattccaatttgaa

SEQ ID NO: 21029 - DNA, 25 bp, Homo sapiens
atagtaaatagcacctctgttccct

SEQ ID NO: 21030 - DNA, 25 bp, Homo sapiens
atgcaataattcaaatccataatat

SEQ ID NO: 21031 - DNA, 25 bp, Homo sapiens
attgattttacgtttgtgatttgaa

SEQ ID NO: 21032 - DNA, 25 bp, Homo sapiens
gaatatttaacttagctcatgaaaa

SEQ ID NO: 21033 - DNA, 25 bp, Homo sapiens
gagaatgttttgtcttaattggtta

SEQ ID NO: 21034 - DNA, 25 bp, Homo sapiens
gatactttcatgttaagtttaggac

SEQ ID NO: 21035 - DNA, 25 bp, Homo sapiens
ggactaatcttgtgtatgctcctta

SEQ ID NO: 21036 - DNA, 25 bp, Homo sapiens
gtaaatgattttccaactctgggaa

SEQ ID NO: 21037 - DNA, 25 bp, Homo sapiens
gtatgctccttaagtgatttgaatc

SEQ ID NO: 21038 - DNA, 25 bp, Homo sapiens
tccaactctgggaatgtgtagaatt

SEQ ID NO: 21039 - DNA, 25 bp, Homo sapiens
aaacccgtatagcgactcagtgaaa

SEQ ID NO: 21040 - DNA, 25 bp, Homo sapiens
agaccagccaaatcctaagagccca

SEQ ID NO: 21041 - DNA, 25 bp, Homo sapiens
agcacgaagtccaaccataattcca

SEQ ID NO: 21042 - DNA, 25 bp, Homo sapiens
atcttaggcaagccccatgatccag

SEQ ID NO: 21043 - DNA, 25 bp, Homo sapiens
attccccagatgaactccaaagctc

SEQ ID NO: 21044 - DNA, 25 bp, Homo sapiens
cctggaagtccacgtatgctagaac

SEQ ID NO: 21045 - DNA, 25 bp, Homo sapiens
ggcagggcctaatctagctgaggtc

SEQ ID NO: 21046 - DNA, 25 bp, Homo sapiens
gggctgtgtcctgaaatcttaggca

SEQ ID NO: 21047 - DNA, 25 bp, Homo sapiens
gtatgctagaactctgggcagggcc

SEQ ID NO: 21048 - DNA, 25 bp, Homo sapiens
tcaaggcctccaatgggctgtgtcc

SEQ ID NO: 21049 - DNA, 25 bp, Homo sapiens
tggccacacactgaaaaacccgtat

SEQ ID NO: 21050 - DNA, 25 bp, Homo sapiens
aagacgttttccctgagaagacata

SEQ ID NO: 21051 - DNA, 25 bp, Homo sapiens
atcaactttcactaaggcatctcag

SEQ ID NO: 21052 - DNA, 25 bp, Homo sapiens
gactaccccaggagtgtgctggctc

SEQ ID NO: 21053 - DNA, 25 bp, Homo sapiens
gatgcagctccaagccattgtatgg

SEQ ID NO: 21054 - DNA, 25 bp, Homo sapiens
gtgctgttacaatgacgccatcgtg

SEQ ID NO: 21055 - DNA, 25 bp, Homo sapiens
gtggagacaagatctacaacccctt

SEQ ID NO: 21056 - DNA, 25 bp, Homo sapiens
tcatctcccatctccagtaaatgtg

SEQ ID NO: 21057 - DNA, 25 bp, Homo sapiens
tctcaggcatgaggaccgactaccc

SEQ ID NO: 21058 - DNA, 25 bp, Homo sapiens
tgcttatgtgtcagtctgtctcctc

SEQ ID NO: 21059 - DNA, 25 bp, Homo sapiens
tggctcagaaccatggctgtgcagc

SEQ ID NO: 21060 - DNA, 25 bp, Homo sapiens
ttgattcctttggcctcacaaacga

SEQ ID NO: 21061 - DNA, 25 bp, Homo sapiens
aaagttcagtgttgtggacccagga

SEQ ID NO: 21062 - DNA, 25 bp, Homo sapiens
aagtcttgcttgataacaatgtgat

SEQ ID NO: 21063 - DNA, 25 bp, Homo sapiens
agccatacttcttcagtgcacaaag

SEQ ID NO: 21064 - DNA, 25 bp, Homo sapiens
aggaaacaacttatgtaacatttgc

SEQ ID NO: 21065 - DNA, 25 bp, Homo sapiens
ccactgtgcaatgcgaagccatact

SEQ ID NO: 21066 - DNA, 25 bp, Homo sapiens
gcgaagccatacttcttcagtgcac

SEQ ID NO: 21067 - DNA, 25 bp, Homo sapiens
gctacagtagtttcaaagttcagtg

SEQ ID NO: 21068 - DNA, 25 bp, Homo sapiens
ggaaattttccataagtcttgcttg

SEQ ID NO: 21069 - DNA, 25 bp, Homo sapiens
gtaacatttgctacctttatgtaaa

SEQ ID NO: 21070 - DNA, 25 bp, Homo sapiens
gttgtggacccaggaaattttccat

SEQ ID NO: 21071 - DNA, 25 bp, Homo sapiens
tcttcagtgcacaaagtcatgttta

SEQ ID NO: 21072 - DNA, 25 bp, Homo sapiens
aagtcataaaaatcctttgatgtgt

SEQ ID NO: 21073 - DNA, 25 bp, Homo sapiens
aatattcttctacctaagacctgaa

SEQ ID NO: 21074 - DNA, 25 bp, Homo sapiens
atatttctctgaacattctgtctca

SEQ ID NO: 21075 - DNA, 25 bp, Homo sapiens
atcttcacatgtcccttattcatat

SEQ ID NO: 21076 - DNA, 25 bp, Homo sapiens
atgtcccttattcatatgctaagca

SEQ ID NO: 21077 - DNA, 25 bp, Homo sapiens
atgttgttccaattttggtcaaagt

SEQ ID NO: 21078 - DNA, 25 bp, Homo sapiens
gaatccatgggcaatacatcttcac

SEQ ID NO: 21079 - DNA, 25 bp, Homo sapiens
gggcaatacatcttcacatgtccct

SEQ ID NO: 21080 - DNA, 25 bp, Homo sapiens
gtaagaagtggctatctagctcttg

SEQ ID NO: 21081 - DNA, 25 bp, Homo sapiens
taagacctgaaatgttggcgaagta

SEQ ID NO: 21082 - DNA, 25 bp, Homo sapiens
tggctatctagctcttgaacaagtc

SEQ ID NO: 21083 - DNA, 25 bp, Homo sapiens
aaactggattccttggagcgctgga

SEQ ID NO: 21084 - DNA, 25 bp, Homo sapiens
agaccaccagtctatttcaatactc

SEQ ID NO: 21085 - DNA, 25 bp, Homo sapiens
agatctgctgcttttcaaactggat

SEQ ID NO: 21086 - DNA, 25 bp, Homo sapiens
atctcagcgatgtcacagggcagga

SEQ ID NO: 21087 - DNA, 25 bp, Homo sapiens
ccatttcaccaggcagctctaaatt

SEQ ID NO: 21088 - DNA, 25 bp, Homo sapiens
gatcggggtccaggtgctggtattt

SEQ ID NO: 21089 - DNA, 25 bp, Homo sapiens
gggaccatccctggagggggattca

SEQ ID NO: 21090 - DNA, 25 bp, Homo sapiens
tactgttacatttgacttctcttta

SEQ ID NO: 21091 - DNA, 25 bp, Homo sapiens
tagccagcagcgtccttggacaaca

SEQ ID NO: 21092 - DNA, 25 bp, Homo sapiens
tatttttcattagcctccaggggat

SEQ ID NO: 21093 - DNA, 25 bp, Homo sapiens
tgagatccacataccacagcaaaat

SEQ ID NO: 21094 - DNA, 25 bp, Homo sapiens
gaagcttttatcgaagctacctata

SEQ ID NO: 21095 - DNA, 25 bp, Homo sapiens
gatgtttcatacacacaggctacca

SEQ ID NO: 21096 - DNA, 25 bp, Homo sapiens
ggatttgagatgtcatgcttctaaa

SEQ ID NO: 21097 - DNA, 25 bp, Homo sapiens
ggctaccaacgagagttttctatgt

SEQ ID NO: 21098 - DNA, 25 bp, Homo sapiens
ggttaatggcatccttctggtacct

SEQ ID NO: 21099 - DNA, 25 bp, Homo sapiens
gtatgtgggtctatctgaagctttt

SEQ ID NO: 21100 - DNA, 25 bp, Homo sapiens
gtgtagatttcacaaactctgtata

SEQ ID NO: 21101 - DNA, 25 bp, Homo sapiens
taacatttatgtgcaagaactactt

SEQ ID NO: 21102 - DNA, 25 bp, Homo sapiens
tctccttcagagacctaagtaggca

SEQ ID NO: 21103 - DNA, 25 bp, Homo sapiens
tgaatttttctccttcagagaccta

SEQ ID NO: 21104 - DNA, 25 bp, Homo sapiens
ttgatctgggttctattttgaattt

SEQ ID NO: 21105 - DNA, 25 bp, Homo sapiens
agaccttgcttctggtactatacac

SEQ ID NO: 21106 - DNA, 25 bp, Homo sapiens
cagttagcaactttctagctctccc

SEQ ID NO: 21107 - DNA, 25 bp, Homo sapiens
ccccgacttgcatgagcagtcttgt

SEQ ID NO: 21108 - DNA, 25 bp, Homo sapiens
gaagtggcccaatgttttgctcatc

SEQ ID NO: 21109 - DNA, 25 bp, Homo sapiens
gctgttgctgcctaagacgggtagc

SEQ ID NO: 21110 - DNA, 25 bp, Homo sapiens
gctttctattggttcagactcacct

SEQ ID NO: 21111 - DNA, 25 bp, Homo sapiens
ggatatctgcacatgtttgctttct

SEQ ID NO: 21112 - DNA, 25 bp, Homo sapiens
ggtacttaagccccattctggaagc

SEQ ID NO: 21113 - DNA, 25 bp, Homo sapiens
gtcactcaatgacttgcagcagcct

SEQ ID NO: 21114 - DNA, 25 bp, Homo sapiens
tcagccttccttcagttgcgagaag

SEQ ID NO: 21115 - DNA, 25 bp, Homo sapiens
ttaactctgacttttggccatacca

SEQ ID NO: 21116 - DNA, 25 bp, Homo sapiens
aaaggctgtgacttctgttagtggg

SEQ ID NO: 21117 - DNA, 25 bp, Homo sapiens
agagaatcttgttcagcgcggactc

SEQ ID NO: 21118 - DNA, 25 bp, Homo sapiens
agtaggcgctcaggaaatgattgct

SEQ ID NO: 21119 - DNA, 25 bp, Homo sapiens
atcttgttcagcgcggactcaacgc

SEQ ID NO: 21120 - DNA, 25 bp, Homo sapiens
ccaggaagtagagggcgccaaaggc

SEQ ID NO: 21121 - DNA, 25 bp, Homo sapiens
cctctggggcgagtgtatggagaac

SEQ ID NO: 21122 - DNA, 25 bp, Homo sapiens
gaatgtggaatgaaagtccccagca

SEQ ID NO: 21123 - DNA, 25 bp, Homo sapiens
gcagagctgcgagagaatcttgttc

SEQ ID NO: 21124 - DNA, 25 bp, Homo sapiens
ggcgagtgtatggagaacttcaagg

SEQ ID NO: 21125 - DNA, 25 bp, Homo sapiens
tagagggcgccaaaggcgacgtgcc

SEQ ID NO: 21126 - DNA, 25 bp, Homo sapiens
tctgttagtggggtggtggtcctct

SEQ ID NO: 21127 - DNA, 25 bp, Homo sapiens
agggtctaactgggagcccgatggc

SEQ ID NO: 21128 - DNA, 25 bp, Homo sapiens
cagcctggtggaattctttttagtc

SEQ ID NO: 21129 - DNA, 25 bp, Homo sapiens
cctcatgcgaatgggctcccaagca

SEQ ID NO: 21130 - DNA, 25 bp, Homo sapiens
gaatcattgccttttgtagttattg

SEQ ID NO: 21131 - DNA, 25 bp, Homo sapiens
gagcctaccgcataaatgtttgtac

SEQ ID NO: 21132 - DNA, 25 bp, Homo sapiens
gatgaggatctccaaacagcctggt

SEQ ID NO: 21133 - DNA, 25 bp, Homo sapiens
ggaggatcccttggttcaatgtatt

SEQ ID NO: 21134 - DNA, 25 bp, Homo sapiens
tcctgacacctggtacctaagtgca

SEQ ID NO: 21135 - DNA, 25 bp, Homo sapiens
tgtactgaacgtctgccttgaaggg

SEQ ID NO: 21136 - DNA, 25 bp, Homo sapiens
ttgcagatgaagccccgcttttgaa

SEQ ID NO: 21137 - DNA, 25 bp, Homo sapiens
ttttagtctgtttcctgacacctgg

SEQ ID NO: 21138 - DNA, 25 bp, Homo sapiens
aactaggcatttagtccaacttttg

SEQ ID NO: 21139 - DNA, 25 bp, Homo sapiens
acagatttgtcaatgcccataaaaa

SEQ ID NO: 21140 - DNA, 25 bp, Homo sapiens
cattaaacaaactattttcgcggag

SEQ ID NO: 21141 - DNA, 25 bp, Homo sapiens
gaaaaagactgacgccgcaaatacc

SEQ ID NO: 21142 - DNA, 25 bp, Homo sapiens
gccgctgagcctaggcggccagagg

SEQ ID NO: 21143 - DNA, 25 bp, Homo sapiens
gcgttttacagctacaagttcacat

SEQ ID NO: 21144 - DNA, 25 bp, Homo sapiens
gctggggactgggagtggtttttct

SEQ ID NO: 21145 - DNA, 25 bp, Homo sapiens
ggcacttcctttgtgtcagtgacaa

SEQ ID NO: 21146 - DNA, 25 bp, Homo sapiens
gtccaacttttgacagcgttttaca

SEQ ID NO: 21147 - DNA, 25 bp, Homo sapiens
tgacgccgcaaataccaaactgcca

SEQ ID NO: 21148 - DNA, 25 bp, Homo sapiens
ttatgttgaagactctttcctctcc

SEQ ID NO: 21149 - DNA, 25 bp, Homo sapiens
aaggggaaagattcctgcggccagc

SEQ ID NO: 21150 - DNA, 25 bp, Homo sapiens
atgacttctgtacggtttgagccca

SEQ ID NO: 21151 - DNA, 25 bp, Homo sapiens
ccgaccgcagaggcgacgacagggg

SEQ ID NO: 21152 - DNA, 25 bp, Homo sapiens
ccgaggtcgttcaccgcgaaaatgg

SEQ ID NO: 21153 - DNA, 25 bp, Homo sapiens
ccttcctcatctgggcgatgtgggc

SEQ ID NO: 21154 - DNA, 25 bp, Homo sapiens
gaattcgccctagagctgtatcatg

SEQ ID NO: 21155 - DNA, 25 bp, Homo sapiens
gagctgtatcatgtattttctttca

SEQ ID NO: 21156 - DNA, 25 bp, Homo sapiens
gattagagaaacttcttccccgatt

SEQ ID NO: 21157 - DNA, 25 bp, Homo sapiens
gcaacaaaagcaaacttggcccgag

SEQ ID NO: 21158 - DNA, 25 bp, Homo sapiens
gcacactcatgacttggagctgccc

SEQ ID NO: 21159 - DNA, 25 bp, Homo sapiens
ggccagcgctttggggaaagtgccc

SEQ ID NO: 21160 - DNA, 25 bp, Homo sapiens
aacttgtataatcttcttgcaggga

SEQ ID NO: 21161 - DNA, 25 bp, Homo sapiens
aatacatgtcaccaaatgcacaaca

SEQ ID NO: 21162 - DNA, 25 bp, Homo sapiens
aatgccttctatgatttccacagtt

SEQ ID NO: 21163 - DNA, 25 bp, Homo sapiens
atgcctggaattattgtctggggtc

SEQ ID NO: 21164 - DNA, 25 bp, Homo sapiens
cctaatcttgcaaatacatgtcacc

SEQ ID NO: 21165 - DNA, 25 bp, Homo sapiens
gaggggagcagtattaacaagcaaa

SEQ ID NO: 21166 - DNA, 25 bp, Homo sapiens
gttttgtttcaatataagctggcca

SEQ ID NO: 21167 - DNA, 25 bp, Homo sapiens
taagctggccagtctggaaccaaaa

SEQ ID NO: 21168 - DNA, 25 bp, Homo sapiens
tccacagttacaattatagatccta

SEQ ID NO: 21169 - DNA, 25 bp, Homo sapiens
tcctttctatcacttctgagaacaa

SEQ ID NO: 21170 - DNA, 25 bp, Homo sapiens
tctggggtcgaggtgttttgtttca

SEQ ID NO: 21171 - DNA, 25 bp, Homo sapiens
actgcacatcccaaaccatgttaca

SEQ ID NO: 21172 - DNA, 25 bp, Homo sapiens
agttgttttggttcattgctttata

SEQ ID NO: 21173 - DNA, 25 bp, Homo sapiens
atatttactctgattctactcactt

SEQ ID NO: 21174 - DNA, 25 bp, Homo sapiens
atcatgaagtctgaagtttgctttc

SEQ ID NO: 21175 - DNA, 25 bp, Homo sapiens
ccagccagaagagggaccacctgta

SEQ ID NO: 21176 - DNA, 25 bp, Homo sapiens
gaccacctgtaaagcaagtcctttc

SEQ ID NO: 21177 - DNA, 25 bp, Homo sapiens
gagcaactgctatattcacattatg

SEQ ID NO: 21178 - DNA, 25 bp, Homo sapiens
gtcctttcaagtttcactgcacatc

SEQ ID NO: 21179 - DNA, 25 bp, Homo sapiens
tactgtgtccaatattctttcaagc

SEQ ID NO: 21180 - DNA, 25 bp, Homo sapiens
tgattctactcacttgttttttaaa

SEQ ID NO: 21181 - DNA, 25 bp, Homo sapiens
ttgaatgccaaacctgttctttttt

SEQ ID NO: 21182 - DNA, 25 bp, Homo sapiens
aaagctccatcggaggtgtcctact

SEQ ID NO: 21183 - DNA, 25 bp, Homo sapiens
atggcctacagctgaaacactattc

SEQ ID NO: 21184 - DNA, 25 bp, Homo sapiens
caattagcttagtacttcaggtcaa

SEQ ID NO: 21185 - DNA, 25 bp, Homo sapiens
gaaaaccttgtttggtcttccagtg

SEQ ID NO: 21186 - DNA, 25 bp, Homo sapiens
gaggtgtcctactggaggcatcaga

SEQ ID NO: 21187 - DNA, 25 bp, Homo sapiens
ggagctttcgctgctcagaaatcaa

SEQ ID NO: 21188 - DNA, 25 bp, Homo sapiens
ggcagcctatgcgagatgcatctta

SEQ ID NO: 21189 - DNA, 25 bp, Homo sapiens
ggtcaacttttaaactcagcactct

SEQ ID NO: 21190 - DNA, 25 bp, Homo sapiens
ggtccttcatcataggcagcctatg

SEQ ID NO: 21191 - DNA, 25 bp, Homo sapiens
tcttgtcttatttcacgatttcatg

SEQ ID NO: 21192 - DNA, 25 bp, Homo sapiens
ttggagtggaggtgcacggtccttc

SEQ ID NO: 21193 - DNA, 25 bp, Homo sapiens
accataggatctgttgccatgctca

SEQ ID NO: 21194 - DNA, 25 bp, Homo sapiens
actggtctcatgcccaaagaagagt

SEQ ID NO: 21195 - DNA, 25 bp, Homo sapiens
agagctttttgttctcatggctggc

SEQ ID NO: 21196 - DNA, 25 bp, Homo sapiens
aggactagcatatgagacttctggt

SEQ ID NO: 21197 - DNA, 25 bp, Homo sapiens
cagggcaatgcatgtcatcccaacc

SEQ ID NO: 21198 - DNA, 25 bp, Homo sapiens
gagacttctggtaccaatggggctg

SEQ ID NO: 21199 - DNA, 25 bp, Homo sapiens
gcaccctgcagggcaatgcatgtca

SEQ ID NO: 21200 - DNA, 25 bp, Homo sapiens
gcttctgcttcttctagagatggtg

SEQ ID NO: 21201 - DNA, 25 bp, Homo sapiens
gtgtggtgctaggactgccaatgcc

SEQ ID NO: 21202 - DNA, 25 bp, Homo sapiens
taaaaccttcaccattaacttgctg

SEQ ID NO: 21203 - DNA, 25 bp, Homo sapiens
tgccaatgccaggcccaagggacaa

SEQ ID NO: 21204 - DNA, 25 bp, Homo sapiens
aagagctggcttctgtagccacctg

SEQ ID NO: 21205 - DNA, 25 bp, Homo sapiens
caaacacgtttgtaggttcttactg

SEQ ID NO: 21206 - DNA, 25 bp, Homo sapiens
ctgtcccttctatttttcagcgaag

SEQ ID NO: 21207 - DNA, 25 bp, Homo sapiens
cttctaaacagtgtcctagtccctc

SEQ ID NO: 21208 - DNA, 25 bp, Homo sapiens
gacggcaaaaggggtaagagctggc

SEQ ID NO: 21209 - DNA, 25 bp, Homo sapiens
gatgaagacgagttggggattgttt

SEQ ID NO: 21210 - DNA, 25 bp, Homo sapiens
gggattgtttaatcacaacctcaag

SEQ ID NO: 21211 - DNA, 25 bp, Homo sapiens
gtgtaattaccccttctaaacagtg

SEQ ID NO: 21212 - DNA, 25 bp, Homo sapiens
gtttgtaggttcttactggaccaga

SEQ ID NO: 21213 - DNA, 25 bp, Homo sapiens
tcagcgaaggtcagtgtatttagtg

SEQ ID NO: 21214 - DNA, 25 bp, Homo sapiens
ttccctctccttgagtgcattttga

SEQ ID NO: 21215 - DNA, 25 bp, Homo sapiens
agatgaacggattcctatgctgtgg

SEQ ID NO: 21216 - DNA, 25 bp, Homo sapiens
caaaattggcagggtctttccacca

SEQ ID NO: 21217 - DNA, 25 bp, Homo sapiens
gcccttgtcactgatggtgacacta

SEQ ID NO: 21218 - DNA, 25 bp, Homo sapiens
gctgtctagtacaagtgcttctcac

SEQ ID NO: 21219 - DNA, 25 bp, Homo sapiens
gcttctcactgattcttggttacca

SEQ ID NO: 21220 - DNA, 25 bp, Homo sapiens
ggggcttaaggctaatttgagttga

SEQ ID NO: 21221 - DNA, 25 bp, Homo sapiens
ggtgacactacttgtaattactgta

SEQ ID NO: 21222 - DNA, 25 bp, Homo sapiens
gtaagactatggcagctgtctagta

SEQ ID NO: 21223 - DNA, 25 bp, Homo sapiens
gtattttttggcagaacactcagat

SEQ ID NO: 21224 - DNA, 25 bp, Homo sapiens
tcattctttttgatggctgatagta

SEQ ID NO: 21225 - DNA, 25 bp, Homo sapiens
ttgccttgcctgcaaaggcgagcct

SEQ ID NO: 21226 - DNA, 25 bp, Homo sapiens
atagtgagacctcatctctacaaaa

SEQ ID NO: 21227 - DNA, 25 bp, Homo sapiens
atgccttgtatatattagctgttta

SEQ ID NO: 21228 - DNA, 25 bp, Homo sapiens
ctatccagaccaccatgtttttatt

SEQ ID NO: 21229 - DNA, 25 bp, Homo sapiens
gaaaagtatttctaggctgagcaag

SEQ ID NO: 21230 - DNA, 25 bp, Homo sapiens
gaccaccatgtttttatttacagtg

SEQ ID NO: 21231 - DNA, 25 bp, Homo sapiens
gagcaaggtagctcatgcctgtaat

SEQ ID NO: 21232 - DNA, 25 bp, Homo sapiens
gtataattctgatgttacttatttc

SEQ ID NO: 21233 - DNA, 25 bp, Homo sapiens
gtgggaaataattctgttttagtga

SEQ ID NO: 21234 - DNA, 25 bp, Homo sapiens
taaagtctatccagaccaccatgtt

SEQ ID NO: 21235 - DNA, 25 bp, Homo sapiens
taagagagtcgctttttggttgaaa

SEQ ID NO: 21236 - DNA, 25 bp, Homo sapiens
tacttatttcaatatgccttgtata

SEQ ID NO: 21237 - DNA, 25 bp, Homo sapiens
aaccagcccaactccagaagatgtt

SEQ ID NO: 21238 - DNA, 25 bp, Homo sapiens
agattttgccccatctactataata

SEQ ID NO: 21239 - DNA, 25 bp, Homo sapiens
aggtggcttttgaatgtcccttgtt

SEQ ID NO: 21240 - DNA, 25 bp, Homo sapiens
attaagctcagataccatcatcagt

SEQ ID NO: 21241 - DNA, 25 bp, Homo sapiens
cagtttacctactcctaatatcgtg

SEQ ID NO: 21242 - DNA, 25 bp, Homo sapiens
cccaacagggggccgaactttgctg

SEQ ID NO: 21243 - DNA, 25 bp, Homo sapiens
gaggcggagagctagctgtcgccca

SEQ ID NO: 21244 - DNA, 25 bp, Homo sapiens
gatgttctgctgtgtcatcagactt

SEQ ID NO: 21245 - DNA, 25 bp, Homo sapiens
gctccttaacagagatacccccaac

SEQ ID NO: 21246 - DNA, 25 bp, Homo sapiens
gcttactaacctcaaaatgctcctt

SEQ ID NO: 21247 - DNA, 25 bp, Homo sapiens
gttcccaggtccctaagggactgct

SEQ ID NO: 21248 - DNA, 25 bp, Homo sapiens
accttccggtgctgggaacacacaa

SEQ ID NO: 21249 - DNA, 25 bp, Homo sapiens
atgaagtctgagaccttccggtgct

SEQ ID NO: 21250 - DNA, 25 bp, Homo sapiens
attttcaaatctttgcttgataagt

SEQ ID NO: 21251 - DNA, 25 bp, Homo sapiens
attttcatcctgcaagcaactcaaa

SEQ ID NO: 21252 - DNA, 25 bp, Homo sapiens
cacgttggtcttttaaccgtgctga

SEQ ID NO: 21253 - DNA, 25 bp, Homo sapiens
ctgccgtaatttaaagctctgttga

SEQ ID NO: 21254 - DNA, 25 bp, Homo sapiens
gagtaggttcggtctgaaaggtgtg

SEQ ID NO: 21255 - DNA, 25 bp, Homo sapiens
gatccacacacgttggtcttttaac

SEQ ID NO: 21256 - DNA, 25 bp, Homo sapiens
ggagcactgtgtttatgctggaata

SEQ ID NO: 21257 - DNA, 25 bp, Homo sapiens
ggcctttatatttgatccacacacg

SEQ ID NO: 21258 - DNA, 25 bp, Homo sapiens
tggacttgctgccgtaatttaaagc

SEQ ID NO: 21259 - DNA, 25 bp, Homo sapiens
aacagtgctgagtactttatttcta

SEQ ID NO: 21260 - DNA, 25 bp, Homo sapiens
acatcacacgatactggttttattc

SEQ ID NO: 21261 - DNA, 25 bp, Homo sapiens
ccttcccaagtgactatcttccttg

SEQ ID NO: 21262 - DNA, 25 bp, Homo sapiens
gacatgtggtcctaggtattataat

SEQ ID NO: 21263 - DNA, 25 bp, Homo sapiens
gagcaagtagtctagtttcaagtgt

SEQ ID NO: 21264 - DNA, 25 bp, Homo sapiens
gatgcgacttgcatggggctgtact

SEQ ID NO: 21265 - DNA, 25 bp, Homo sapiens
ggaaatgggagtagctaagcctgga

SEQ ID NO: 21266 - DNA, 25 bp, Homo sapiens
gggattgtccccagattaacaggaa

SEQ ID NO: 21267 - DNA, 25 bp, Homo sapiens
gggctgtactcagacatgtggtcct

SEQ ID NO: 21268 - DNA, 25 bp, Homo sapiens
ggttttattctggactatctatcct

SEQ ID NO: 21269 - DNA, 25 bp, Homo sapiens
tatctatcctactcatgggtccaag

SEQ ID NO: 21270 - DNA, 25 bp, Homo sapiens
aatgccccagactgacttgtgagtg

SEQ ID NO: 21271 - DNA, 25 bp, Homo sapiens
agaacactgcactgagtcctaaagg

SEQ ID NO: 21272 - DNA, 25 bp, Homo sapiens
agtattaacccttcatctgttcttg

SEQ ID NO: 21273 - DNA, 25 bp, Homo sapiens
catctgttcttgaaactggttgggg

SEQ ID NO: 21274 - DNA, 25 bp, Homo sapiens
gacagcattatgttatttccattca

SEQ ID NO: 21275 - DNA, 25 bp, Homo sapiens
gagtttgtgtgtaaacaggctcatc

SEQ ID NO: 21276 - DNA, 25 bp, Homo sapiens
gatggacatgttgtgggggcaccaa

SEQ ID NO: 21277 - DNA, 25 bp, Homo sapiens
ggagccttataggcaatgccccaga

SEQ ID NO: 21278 - DNA, 25 bp, Homo sapiens
tgagggcagagtctctgggtttcag

SEQ ID NO: 21279 - DNA, 25 bp, Homo sapiens
tgggggcaccaatgcagaacactgc

SEQ ID NO: 21280 - DNA, 25 bp, Homo sapiens
tgttatttccattcactattactta

SEQ ID NO: 21281 - DNA, 25 bp, Homo sapiens
agtactatctttgtgttgcagcctc

SEQ ID NO: 21282 - DNA, 25 bp, Homo sapiens
atggctctcatgtacttttaaatta

SEQ ID NO: 21283 - DNA, 25 bp, Homo sapiens
cagaagtgttcacatggctctcatg

SEQ ID NO: 21284 - DNA, 25 bp, Homo sapiens
cccgggttgctcctttgattagaga

SEQ ID NO: 21285 - DNA, 25 bp, Homo sapiens
gattacgtttacattcttctctttt

SEQ ID NO: 21286 - DNA, 25 bp, Homo sapiens
gcagcctcaaccaacaacaatgtgt

SEQ ID NO: 21287 - DNA, 25 bp, Homo sapiens
ggtttacatacgtttgtgtggtgac

SEQ ID NO: 21288 - DNA, 25 bp, Homo sapiens
gtaccgaatttagttcatgcattgg

SEQ ID NO: 21289 - DNA, 25 bp, Homo sapiens
gttcatgcattggtcttagagggtg

SEQ ID NO: 21290 - DNA, 25 bp, Homo sapiens
gtttgccatttgctggacaaccaac

SEQ ID NO: 21291 - DNA, 25 bp, Homo sapiens
tttacattcttctcttttctatgaa

SEQ ID NO: 21292 - DNA, 25 bp, Homo sapiens
aaagctggtcactgactataagaat

SEQ ID NO: 21293 - DNA, 25 bp, Homo sapiens
aaatcagtgaggcatttgacctaat

SEQ ID NO: 21294 - DNA, 25 bp, Homo sapiens
acctgcctggttaatttattacctg

SEQ ID NO: 21295 - DNA, 25 bp, Homo sapiens
agctgctggtagcaaaggattgact

SEQ ID NO: 21296 - DNA, 25 bp, Homo sapiens
atcggccgtactataaatggaacat

SEQ ID NO: 21297 - DNA, 25 bp, Homo sapiens
ctatcccaaagctggtcactgacta

SEQ ID NO: 21298 - DNA, 25 bp, Homo sapiens
ctttcattggagtagctgctggtag

SEQ ID NO: 21299 - DNA, 25 bp, Homo sapiens
gaggagctaataatcggccgtacta

SEQ ID NO: 21300 - DNA, 25 bp, Homo sapiens
gaggcatttgacctaatgaaccaag

SEQ ID NO: 21301 - DNA, 25 bp, Homo sapiens
ggttaatttattacctgatttgatg

SEQ ID NO: 21302 - DNA, 25 bp, Homo sapiens
gtgtagattctatcccaaagctggt

SEQ ID NO: 21303 - DNA, 25 bp, Homo sapiens
aggcttcaaagttttcctggctctg

SEQ ID NO: 21304 - DNA, 25 bp, Homo sapiens
cactttggacccagcggtgatggtg

SEQ ID NO: 21305 - DNA, 25 bp, Homo sapiens
cccaccgtgaattcgttttggatca

SEQ ID NO: 21306 - DNA, 25 bp, Homo sapiens
cctggctctgcagttggtacttgcc

SEQ ID NO: 21307 - DNA, 25 bp, Homo sapiens
gaattcgttttggatcactttggac

SEQ ID NO: 21308 - DNA, 25 bp, Homo sapiens
ggacccagcggtgatggtgaacttg

SEQ ID NO: 21309 - DNA, 25 bp, Homo sapiens
ggtgaacttgaagtgcttcccattc

SEQ ID NO: 21310 - DNA, 25 bp, Homo sapiens
tcatggtggcaatagagctccctct

SEQ ID NO: 21311 - DNA, 25 bp, Homo sapiens
tccggcagaccgattgccttcatga

SEQ ID NO: 21312 - DNA, 25 bp, Homo sapiens
ttgaagtgcttcccattctgcacga

SEQ ID NO: 21313 - DNA, 25 bp, Homo sapiens
ttggtacttgccggagaaactcatg

SEQ ID NO: 21314 - DNA, 25 bp, Homo sapiens
aaccaggagcggggatggctttgct

SEQ ID NO: 21315 - DNA, 25 bp, Homo sapiens
aaccatctctagaaaccatctcatc

SEQ ID NO: 21316 - DNA, 25 bp, Homo sapiens
ctgccacatggcaaagctatatcat

SEQ ID NO: 21317 - DNA, 25 bp, Homo sapiens
ctggcagccagtagaaaccatctct

SEQ ID NO: 21318 - DNA, 25 bp, Homo sapiens
gaaaccatctcatctttatccataa

SEQ ID NO: 21319 - DNA, 25 bp, Homo sapiens
gaagcatatcaatcgatgtctttgt

SEQ ID NO: 21320 - DNA, 25 bp, Homo sapiens
gagcacagtgttctctagacatgta

SEQ ID NO: 21321 - DNA, 25 bp, Homo sapiens
gcagtttcagcaggacctgtaagtt

SEQ ID NO: 21322 - DNA, 25 bp, Homo sapiens
gctttgctctagattctggcagcca

SEQ ID NO: 21323 - DNA, 25 bp, Homo sapiens
gtcattctgtgaccaaccaggagcg

SEQ ID NO: 21324 - DNA, 25 bp, Homo sapiens
tcgatgtctttgtcagtcattctgt

SEQ ID NO: 21325 - DNA, 25 bp, Homo sapiens
aatcccagatttcgcaattcttctt

SEQ ID NO: 21326 - DNA, 25 bp, Homo sapiens
agacgtggctacttcatcaacaata

SEQ ID NO: 21327 - DNA, 25 bp, Homo sapiens
cacggattccagagccaatcccaga

SEQ ID NO: 21328 - DNA, 25 bp, Homo sapiens
cctcactacagctggtatcgcaatg

SEQ ID NO: 21329 - DNA, 25 bp, Homo sapiens
gaaacaggcactttggtgttcactg

SEQ ID NO: 21330 - DNA, 25 bp, Homo sapiens
gaagtctatgacctgaacattggcg

SEQ ID NO: 21331 - DNA, 25 bp, Homo sapiens
gggcatctgctgtgcatacagacgt

SEQ ID NO: 21332 - DNA, 25 bp, Homo sapiens
gtgccgaaggctgtaccagtaggca

SEQ ID NO: 21333 - DNA, 25 bp, Homo sapiens
tatcgcaatgatgtaccactgccca

SEQ ID NO: 21334 - DNA, 25 bp, Homo sapiens
tgagagcgcacagagcgcacgtgca

SEQ ID NO: 21335 - DNA, 25 bp, Homo sapiens
tggagttaactacatccgcactgac

SEQ ID NO: 21336 - DNA, 25 bp, Homo sapiens
aacttcgactcctctgagaaggacg

SEQ ID NO: 21337 - DNA, 25 bp, Homo sapiens
cccaccccaaggtgcgcagtgggga

SEQ ID NO: 21338 - DNA, 25 bp, Homo sapiens
gacaacttcgactcctctgagaagg

SEQ ID NO: 21339 - DNA, 25 bp, Homo sapiens
gaccgcaatggcagcgggacgctgg

SEQ ID NO: 21340 - DNA, 25 bp, Homo sapiens
gactcctctgagaaggacgggcagg

SEQ ID NO: 21341 - DNA, 25 bp, Homo sapiens
gagaaggacgggcaggtcacactgg

SEQ ID NO: 21342 - DNA, 25 bp, Homo sapiens
gcaatggcagcgggacgctggatct

SEQ ID NO: 21343 - DNA, 25 bp, Homo sapiens
gggaccgcaatggcagcgggacgct

SEQ ID NO: 21344 - DNA, 25 bp, Homo sapiens
gggagtggaccgaggacgaggtgct

SEQ ID NO: 21345 - DNA, 25 bp, Homo sapiens
tcgactcctctgagaaggacgggca

SEQ ID NO: 21346 - DNA, 25 bp, Homo sapiens
tggcagcgggacgctggatctggag

SEQ ID NO: 21347 - DNA, 25 bp, Homo sapiens
acggatgaggagttcgtggccatga

SEQ ID NO: 21348 - DNA, 25 bp, Homo sapiens
caagctggaccgcagtggggacggc

SEQ ID NO: 21349 - DNA, 25 bp, Homo sapiens
cggcgtcgtgacggtggacgacctc

SEQ ID NO: 21350 - DNA, 25 bp, Homo sapiens
ctactacagcggcgtgagtgcctcc

SEQ ID NO: 21351 - DNA, 25 bp, Homo sapiens
gagggtgtgtgcaggaagtgggacc

SEQ ID NO: 21352 - DNA, 25 bp, Homo sapiens
gagtgcctccatgaacacggatgag

SEQ ID NO: 21353 - DNA, 25 bp, Homo sapiens
ggccatgatgaccagtgcctggcag

SEQ ID NO: 21354 - DNA, 25 bp, Homo sapiens
ggctgtcatcgcagctgcatttgcc

SEQ ID NO: 21355 - DNA, 25 bp, Homo sapiens
ggtcacactggcggaattccaggac

SEQ ID NO: 21356 - DNA, 25 bp, Homo sapiens
tggcggaattccaggactactacag

SEQ ID NO: 21357 - DNA, 25 bp, Homo sapiens
tgtcatcgcagctgcatttgccaag

SEQ ID NO: 21358 - DNA, 25 bp, Homo sapiens
agcccacctgaatgaccttgaaaat

SEQ ID NO: 21359 - DNA, 25 bp, Homo sapiens
agtagaacgtgtacgcagagcccac

SEQ ID NO: 21360 - DNA, 25 bp, Homo sapiens
gatattagcatttgccatattcctg

SEQ ID NO: 21361 - DNA, 25 bp, Homo sapiens
ggtttttgccaatccagaagactgt

SEQ ID NO: 21362 - DNA, 25 bp, Homo sapiens
tattcatggcttttgcatcctatgc

SEQ ID NO: 21363 - DNA, 25 bp, Homo sapiens
actcatccgtttgccaatcattgca

SEQ ID NO: 21364 - DNA, 25 bp, Homo sapiens
ataatgactggtcttccttacctgg

SEQ ID NO: 21365 - DNA, 25 bp, Homo sapiens
atatatttttactgctttctgaatg

SEQ ID NO: 21366 - DNA, 25 bp, Homo sapiens
atattgttttgcattgtctgttggc

SEQ ID NO: 21367 - DNA, 25 bp, Homo sapiens
gatacttgctccattcatacacaac

SEQ ID NO: 21368 - DNA, 25 bp, Homo sapiens
gcagtcactttgacaggttcctttt

SEQ ID NO: 21369 - DNA, 25 bp, Homo sapiens
gcttttttaactcatccgtttgcca

SEQ ID NO: 21370 - DNA, 25 bp, Homo sapiens
ggcttggatgtttttagttctgact

SEQ ID NO: 21371 - DNA, 25 bp, Homo sapiens
ggttccttttaagtggactctctga

SEQ ID NO: 21372 - DNA, 25 bp, Homo sapiens
gtgaactgtcatgatacgcttaagg

SEQ ID NO: 21373 - DNA, 25 bp, Homo sapiens
gttagttttagaattacaccacaag

SEQ ID NO: 21374 - DNA, 25 bp, Homo sapiens
accacctggatggatctgctccatg

SEQ ID NO: 21375 - DNA, 25 bp, Homo sapiens
aggcatactctccaggattgtccac

SEQ ID NO: 21376 - DNA, 25 bp, Homo sapiens
ctgctccatgcagatctagccaggc

SEQ ID NO: 21377 - DNA, 25 bp, Homo sapiens
gactgtcctacaatatcattttcct

SEQ ID NO: 21378 - DNA, 25 bp, Homo sapiens
gattgtccacaaatgtcctcagagg

SEQ ID NO: 21379 - DNA, 25 bp, Homo sapiens
ggcaaatgtccaagcatcagcaaga

SEQ ID NO: 21380 - DNA, 25 bp, Homo sapiens
ggtcaactccaaggcaaatgtccaa

SEQ ID NO: 21381 - DNA, 25 bp, Homo sapiens
gtcctcagagggtccctaggtgggt

SEQ ID NO: 21382 - DNA, 25 bp, Homo sapiens
tccctaggtgggtcaactccaaggc

SEQ ID NO: 21383 - DNA, 25 bp, Homo sapiens
tcctttcatcctcagcaagtgctga

SEQ ID NO: 21384 - DNA, 25 bp, Homo sapiens
tgggagtcaagtgtgcctgctatcc

SEQ ID NO: 21385 - DNA, 25 bp, Homo sapiens
aaagaccttcagcagtcaactgaat

SEQ ID NO: 21386 - DNA, 25 bp, Homo sapiens
aaatgcattcggttcttgacagctg

SEQ ID NO: 21387 - DNA, 25 bp, Homo sapiens
aactggctcccaggggaatagagga

SEQ ID NO: 21388 - DNA, 25 bp, Homo sapiens
aggtgtttgctaatatacacaatca

SEQ ID NO: 21389 - DNA, 25 bp, Homo sapiens
atacacaatcattactataacctaa

SEQ ID NO: 21390 - DNA, 25 bp, Homo sapiens
ctgttaagtgttttctaagcaagac

SEQ ID NO: 21391 - DNA, 25 bp, Homo sapiens
tagaggaaaccaggaattcatttca

SEQ ID NO: 21392 - DNA, 25 bp, Homo sapiens
tagagttgctaatgactgtccttga

SEQ ID NO: 21393 - DNA, 25 bp, Homo sapiens
tgaaattattataactggctcccag

SEQ ID NO: 21394 - DNA, 25 bp, Homo sapiens
ttcggttcttgacagctgaaaacaa

SEQ ID NO: 21395 - DNA, 25 bp, Homo sapiens
ttgtttatggatttacttctttgag

SEQ ID NO: 21396 - DNA, 25 bp, Homo sapiens
aacagcccctgttgaagaatctaca

SEQ ID NO: 21397 - DNA, 25 bp, Homo sapiens
acttcagggagaatctaccgccttc

SEQ ID NO: 21398 - DNA, 25 bp, Homo sapiens
agcccaggttcaactgacacagcac

SEQ ID NO: 21399 - DNA, 25 bp, Homo sapiens
agccttatcctttggtcaagaatct

SEQ ID NO: 21400 - DNA, 25 bp, Homo sapiens
caatattccacagcagcccagatgc

SEQ ID NO: 21401 - DNA, 25 bp, Homo sapiens
caccacaagctcaggcatcgttgaa

SEQ ID NO: 21402 - DNA, 25 bp, Homo sapiens
cccaggctcaacggatacaacactg

SEQ ID NO: 21403 - DNA, 25 bp, Homo sapiens
gcaagtggaacaacaccctcatctg

SEQ ID NO: 21404 - DNA, 25 bp, Homo sapiens
ggatacaacactgttacctgccagc

SEQ ID NO: 21405 - DNA, 25 bp, Homo sapiens
tcgttgaagcatctacacgcgtcca

SEQ ID NO: 21406 - DNA, 25 bp, Homo sapiens
tggtcaagaatctacaaccttccac

SEQ ID NO: 21407 - DNA, 25 bp, Homo sapiens
aagcagaggctagaattacagtatt

SEQ ID NO: 21408 - DNA, 25 bp, Homo sapiens
aaggtgggcagataacctgcggtca

SEQ ID NO: 21409 - DNA, 25 bp, Homo sapiens
agtaacaccacagttgctttgtttc

SEQ ID NO: 21410 - DNA, 25 bp, Homo sapiens
atagcttacctgaggttcagttctt

SEQ ID NO: 21411 - DNA, 25 bp, Homo sapiens
atttgagaataccagctgggcacgg

SEQ ID NO: 21412 - DNA, 25 bp, Homo sapiens
ctttgtgaacctgtgagtactccac

SEQ ID NO: 21413 - DNA, 25 bp, Homo sapiens
gagtactccacagtttactggggga

SEQ ID NO: 21414 - DNA, 25 bp, Homo sapiens
tatgttgtatacttttgaattttta

SEQ ID NO: 21415 - DNA, 25 bp, Homo sapiens
tgggatatcagtgaactatgttgta

SEQ ID NO: 21416 - DNA, 25 bp, Homo sapiens
tttccaacagaagtaacaccacagt

SEQ ID NO: 21417 - DNA, 25 bp, Homo sapiens
tttctttttatagcttacctgaggt

SEQ ID NO: 21418 - DNA, 25 bp, Homo sapiens
acttctgatcaccctgtacatacat

SEQ ID NO: 21419 - DNA, 25 bp, Homo sapiens
attagtgtgtttgtttggtccagaa

SEQ ID NO: 21420 - DNA, 25 bp, Homo sapiens
cgaaaggcacaatcactgtttcaga

SEQ ID NO: 21421 - DNA, 25 bp, Homo sapiens
gacacttttgctaacaggtaccact

SEQ ID NO: 21422 - DNA, 25 bp, Homo sapiens
gagacaatcacatgacagtcaccac

SEQ ID NO: 21423 - DNA, 25 bp, Homo sapiens
gaggtgcagcatcgtgacacttttg

SEQ ID NO: 21424 - DNA, 25 bp, Homo sapiens
gattccgtagttcgtgggtatcagt

SEQ ID NO: 21425 - DNA, 25 bp, Homo sapiens
gggtgtagtctgtttagattccgta

SEQ ID NO: 21426 - DNA, 25 bp, Homo sapiens
gtatcagtttcggtagaggtgcagc

SEQ ID NO: 21427 - DNA, 25 bp, Homo sapiens
gtcccaactaagtctggcctgagct

SEQ ID NO: 21428 - DNA, 25 bp, Homo sapiens
taacaggtaccacttctgatcaccc

SEQ ID NO: 21429 - DNA, 25 bp, Homo sapiens
aagataggcatacttgctacaaaat

SEQ ID NO: 21430 - DNA, 25 bp, Homo sapiens
agaagccaatacactcagttggata

SEQ ID NO: 21431 - DNA, 25 bp, Homo sapiens
agtgtctctgaataactttatgtat

SEQ ID NO: 21432 - DNA, 25 bp, Homo sapiens
atctttatctttttgcatactttgt

SEQ ID NO: 21433 - DNA, 25 bp, Homo sapiens
gaattcctgtgatttgtagagtttt

SEQ ID NO: 21434 - DNA, 25 bp, Homo sapiens
gataaacttgttgcactcaaggtac

SEQ ID NO: 21435 - DNA, 25 bp, Homo sapiens
gcactcaaggtacatttctactttg

SEQ ID NO: 21436 - DNA, 25 bp, Homo sapiens
gcatatctgttacagaattcctgtg

SEQ ID NO: 21437 - DNA, 25 bp, Homo sapiens
ggtacatttctactttgtaaagcaa

SEQ ID NO: 21438 - DNA, 25 bp, Homo sapiens
gtagagttttctagtcagttttgaa

SEQ ID NO: 21439 - DNA, 25 bp, Homo sapiens
taaataggtcacatatctttatctt

SEQ ID NO: 21440 - DNA, 25 bp, Homo sapiens
acagccccggataggttagaaagtg

SEQ ID NO: 21441 - DNA, 25 bp, Homo sapiens
attggcaggctgtccgagtagttac

SEQ ID NO: 21442 - DNA, 25 bp, Homo sapiens
caatctggaaaccagtcaggctttt

SEQ ID NO: 21443 - DNA, 25 bp, Homo sapiens
caggctgtccgagtagttacactta

SEQ ID NO: 21444 - DNA, 25 bp, Homo sapiens
cccggcccaatctggaaaccagtca

SEQ ID NO: 21445 - DNA, 25 bp, Homo sapiens
gaaagcagattcctggaagttcaaa

SEQ ID NO: 21446 - DNA, 25 bp, Homo sapiens
gagcaagctcaaagacccgtgtgcc

SEQ ID NO: 21447 - DNA, 25 bp, Homo sapiens
gctttccaattgggatatcctgtga

SEQ ID NO: 21448 - DNA, 25 bp, Homo sapiens
gtgatatgattggcaggctgtccga

SEQ ID NO: 21449 - DNA, 25 bp, Homo sapiens
tgttggtggatacccccaactttgg

SEQ ID NO: 21450 - DNA, 25 bp, Homo sapiens
ttgggttcgaaagcagattcctgga

SEQ ID NO: 21451 - DNA, 25 bp, Homo sapiens
aaattctgagagctctggctgtggt

SEQ ID NO: 21452 - DNA, 25 bp, Homo sapiens
aaggtaagattttctcctaccactg

SEQ ID NO: 21453 - DNA, 25 bp, Homo sapiens
aaggtgggaaaactggctgaggact

SEQ ID NO: 21454 - DNA, 25 bp, Homo sapiens
attgctgctggtattctgtaaaaaa

SEQ ID NO: 21455 - DNA, 25 bp, Homo sapiens
ctaggtatgcctttatagcttagct

SEQ ID NO: 21456 - DNA, 25 bp, Homo sapiens
ctcaacactcaaatgattgctgctg

SEQ ID NO: 21457 - DNA, 25 bp, Homo sapiens
ctcctaccactgaataccactgtgt

SEQ ID NO: 21458 - DNA, 25 bp, Homo sapiens
ctggctgtggtacatttcttcagat

SEQ ID NO: 21459 - DNA, 25 bp, Homo sapiens
gatatttctcatggcctttgatgga

SEQ ID NO: 21460 - DNA, 25 bp, Homo sapiens
ggtgcatatttctgtcatgtctgct

SEQ ID NO: 21461 - DNA, 25 bp, Homo sapiens
tgtcatgtctgctaggtatgccttt

SEQ ID NO: 21462 - DNA, 25 bp, Homo sapiens
acctcagcgaagaccacgatgaagc

SEQ ID NO: 21463 - DNA, 25 bp, Homo sapiens
caacctcagcgaagaccacgatgaa

SEQ ID NO: 21464 - DNA, 25 bp, Homo sapiens
cacaacctcagcgaagaccacgatg

SEQ ID NO: 21465 - DNA, 25 bp, Homo sapiens
caccaagttacgtcaaagtctcagg

SEQ ID NO: 21466 - DNA, 25 bp, Homo sapiens
ccttcagagacaccgaccatggaca

SEQ ID NO: 21467 - DNA, 25 bp, Homo sapiens
ggctgggtcagcagtgggcaaaaca

SEQ ID NO: 21468 - DNA, 25 bp, Homo sapiens
gtcaaagtctcaggagcagctccgg

SEQ ID NO: 21469 - DNA, 25 bp, Homo sapiens
gttacgtcaaagtctcaggagcagc

SEQ ID NO: 21470 - DNA, 25 bp, Homo sapiens
tcagcgaagaccacgatgaagcccc

SEQ ID NO: 21471 - DNA, 25 bp, Homo sapiens
tccggtctccatagaggctgggtca

SEQ ID NO: 21472 - DNA, 25 bp, Homo sapiens
ttcagagacaccgaccatggacatc

SEQ ID NO: 21473 - DNA, 25 bp, Homo sapiens
aaaccaataaacagacttgcagggg

SEQ ID NO: 21474 - DNA, 25 bp, Homo sapiens
aagtagtgtccataagcccatttga

SEQ ID NO: 21475 - DNA, 25 bp, Homo sapiens
aattactcatatagttggccacata

SEQ ID NO: 21476 - DNA, 25 bp, Homo sapiens
acatttacataaatctcagtcattt

SEQ ID NO: 21477 - DNA, 25 bp, Homo sapiens
agcccatttgactgtattacaagtt

SEQ ID NO: 21478 - DNA, 25 bp, Homo sapiens
gaaaccagcaagtagggctaattat

SEQ ID NO: 21479 - DNA, 25 bp, Homo sapiens
gcatcattggcaataaatctactca

SEQ ID NO: 21480 - DNA, 25 bp, Homo sapiens
gtagggctaattatcagtaacaaat

SEQ ID NO: 21481 - DNA, 25 bp, Homo sapiens
gtccataagcccatttgactgtatt

SEQ ID NO: 21482 - DNA, 25 bp, Homo sapiens
gtgtgaagtgaagtgttgctgctgt

SEQ ID NO: 21483 - DNA, 25 bp, Homo sapiens
gtgttgctgctgtaagtagtgtcca

SEQ ID NO: 21484 - DNA, 25 bp, Homo sapiens
atgggctgttgaaatgacctccatt

SEQ ID NO: 21485 - DNA, 25 bp, Homo sapiens
catccttcttttgtagcttacacca

SEQ ID NO: 21486 - DNA, 25 bp, Homo sapiens
gatacagtagatttcttcttagcag

SEQ ID NO: 21487 - DNA, 25 bp, Homo sapiens
gatgctctgtctgtagacactgctt

SEQ ID NO: 21488 - DNA, 25 bp, Homo sapiens
gcagataattatccaggcttaaagt

SEQ ID NO: 21489 - DNA, 25 bp, Homo sapiens
gcttacaccatgtggatgctctgtc

SEQ ID NO: 21490 - DNA, 25 bp, Homo sapiens
gtgtctgtgacttaatgatttcatg

SEQ ID NO: 21491 - DNA, 25 bp, Homo sapiens
tacttattgaatctgctttactttt

SEQ ID NO: 21492 - DNA, 25 bp, Homo sapiens
tgtaagtctgtcgcatacatccttc

SEQ ID NO: 21493 - DNA, 25 bp, Homo sapiens
tgtgtatatagcatcctgagctgtg

SEQ ID NO: 21494 - DNA, 25 bp, Homo sapiens
tttagcaattttcttccttgtgaac

SEQ ID NO: 21495 - DNA, 25 bp, Homo sapiens
acatttcaaaatctgggtatactta

SEQ ID NO: 21496 - DNA, 25 bp, Homo sapiens
atacatgtttgttaagcctattgaa

SEQ ID NO: 21497 - DNA, 25 bp, Homo sapiens
atatacctcaaaaatcactaaactt

SEQ ID NO: 21498 - DNA, 25 bp, Homo sapiens
atctgggtatacttataatccatta

SEQ ID NO: 21499 - DNA, 25 bp, Homo sapiens
atttgtaacacaaggggcattggat

SEQ ID NO: 21500 - DNA, 25 bp, Homo sapiens
gaatcattagctctttggaaacata

SEQ ID NO: 21501 - DNA, 25 bp, Homo sapiens
gtatagcttacatgttattatttgt

SEQ ID NO: 21502 - DNA, 25 bp, Homo sapiens
gtgtcattgtttaatcacagactta

SEQ ID NO: 21503 - DNA, 25 bp, Homo sapiens
tcactaaactttccagatctctgtc

SEQ ID NO: 21504 - DNA, 25 bp, Homo sapiens
tccagatctctgtcctattatttgt

SEQ ID NO: 21505 - DNA, 25 bp, Homo sapiens
tgatttctagggttccttttgcttc

SEQ ID NO: 21506 - DNA, 25 bp, Homo sapiens
aaagtttcttttctgaggctgccat

SEQ ID NO: 21507 - DNA, 25 bp, Homo sapiens
aagtcttcatggcttttctggtctt

SEQ ID NO: 21508 - DNA, 25 bp, Homo sapiens
cacagggagcttctttctccttagc

SEQ ID NO: 21509 - DNA, 25 bp, Homo sapiens
ccatactgccactgtccaggtggag

SEQ ID NO: 21510 - DNA, 25 bp, Homo sapiens
cttctcatcaaagcctaccatggat

SEQ ID NO: 21511 - DNA, 25 bp, Homo sapiens
taaggatatttggctcacctcgttc

SEQ ID NO: 21512 - DNA, 25 bp, Homo sapiens
tgcccatgatgatccctgacagcaa

SEQ ID NO: 21513 - DNA, 25 bp, Homo sapiens
ttcggctgctcagggttcatctgaa

SEQ ID NO: 21514 - DNA, 25 bp, Homo sapiens
ttctccttagccagtaatctgccca

SEQ ID NO: 21515 - DNA, 25 bp, Homo sapiens
acaatgtcaccatggttaccaccta

SEQ ID NO: 21516 - DNA, 25 bp, Homo sapiens
caagacccttgtctgcagtggtgct

SEQ ID NO: 21517 - DNA, 25 bp, Homo sapiens
ccttgccactcactgttgtatacat

SEQ ID NO: 21518 - DNA, 25 bp, Homo sapiens
gactggaacaaagtgaccgctgtgt

SEQ ID NO: 21519 - DNA, 25 bp, Homo sapiens
gctgtgtaaaactactgccttgcca

SEQ ID NO: 21520 - DNA, 25 bp, Homo sapiens
ggatttctcaacctttggtcagtta

SEQ ID NO: 21521 - DNA, 25 bp, Homo sapiens
gtcttccttcaacttcagacaaagg

SEQ ID NO: 21522 - DNA, 25 bp, Homo sapiens
gtgtatttcacatttcttggacttt

SEQ ID NO: 21523 - DNA, 25 bp, Homo sapiens
taccacctacccagaagactgttcc

SEQ ID NO: 21524 - DNA, 25 bp, Homo sapiens
tcagacttcctcagcgcaggatgta

SEQ ID NO: 21525 - DNA, 25 bp, Homo sapiens
tgcaggctgcccgttaagatggtgg

SEQ ID NO: 21526 - DNA, 25 bp, Homo sapiens
aaatcagtgagagaatacagggcca

SEQ ID NO: 21527 - DNA, 25 bp, Homo sapiens
cagtcagtctggtgaactgctcgtt

SEQ ID NO: 21528 - DNA, 25 bp, Homo sapiens
ctggtgaactgctcgtttgggacct

SEQ ID NO: 21529 - DNA, 25 bp, Homo sapiens
gaaattccgttttatctggcagtca

SEQ ID NO: 21530 - DNA, 25 bp, Homo sapiens
gctttgtctgggatggaaattccgt

SEQ ID NO: 21531 - DNA, 25 bp, Homo sapiens
ggatggaaattccgttttatctggc

SEQ ID NO: 21532 - DNA, 25 bp, Homo sapiens
gtcagtctggtgaactgctcgtttg

SEQ ID NO: 21533 - DNA, 25 bp, Homo sapiens
gtctggtgaactgctcgtttgggac

SEQ ID NO: 21534 - DNA, 25 bp, Homo sapiens
tatctggcagtcagtctggtgaact

SEQ ID NO: 21535 - DNA, 25 bp, Homo sapiens
tccatgacatcagatgagccccaga

SEQ ID NO: 21536 - DNA, 25 bp, Homo sapiens
tgagagaatacagggccacacaggt

SEQ ID NO: 21537 - DNA, 25 bp, Homo sapiens
aattgtgtcctctatgtgtaaggca

SEQ ID NO: 21538 - DNA, 25 bp, Homo sapiens
acataagcacactaagcaccttaca

SEQ ID NO: 21539 - DNA, 25 bp, Homo sapiens
gaaccaaatgacctctagtgttccc

SEQ ID NO: 21540 - DNA, 25 bp, Homo sapiens
gagctgcggtttctaatctttgtcc

SEQ ID NO: 21541 - DNA, 25 bp, Homo sapiens
ggtgacttccagctgtttaaaacaa

SEQ ID NO: 21542 - DNA, 25 bp, Homo sapiens
gtacagcatgaaaggcttcctctac

SEQ ID NO: 21543 - DNA, 25 bp, Homo sapiens
gtatggtgcttgagtactgacttag

SEQ ID NO: 21544 - DNA, 25 bp, Homo sapiens
gtgtaaggcatagcacatttagcac

SEQ ID NO: 21545 - DNA, 25 bp, Homo sapiens
taggagcttctcaaagcacgctgcc

SEQ ID NO: 21546 - DNA, 25 bp, Homo sapiens
tcccttactccctatgagactgtgg

SEQ ID NO: 21547 - DNA, 25 bp, Homo sapiens
tgagactgtggacctgtcacttggc

SEQ ID NO: 21548 - DNA, 25 bp, Homo sapiens
acttttcctttgtccatcgaggtgt

SEQ ID NO: 21549 - DNA, 25 bp, Homo sapiens
catgtgacagaaacttttcctttgt

SEQ ID NO: 21550 - DNA, 25 bp, Homo sapiens
ctttgtccatcgaggtgtttcataa

SEQ ID NO: 21551 - DNA, 25 bp, Homo sapiens
gggtcgtctatgtgtcatatggttt

SEQ ID NO: 21552 - DNA, 25 bp, Homo sapiens
ggtgtttcataagttttttggtgtg

SEQ ID NO: 21553 - DNA, 25 bp, Homo sapiens
gtccatcgaggtgtttcataagttt

SEQ ID NO: 21554 - DNA, 25 bp, Homo sapiens
tgtgtcatatggttttacttttctc

SEQ ID NO: 21555 - DNA, 25 bp, Homo sapiens
tgttttctgggtcgtctatgtgtca

SEQ ID NO: 21556 - DNA, 25 bp, Homo sapiens
ttctgggtcgtctatgtgtcatatg

SEQ ID NO: 21557 - DNA, 25 bp, Homo sapiens
tttcctttgtccatcgaggtgtttc

SEQ ID NO: 21558 - DNA, 25 bp, Homo sapiens
ttttctgggtcgtctatgtgtcata

SEQ ID NO: 21559 - DNA, 25 bp, Homo sapiens
aggtgtgacctcactagcgttgact

SEQ ID NO: 21560 - DNA, 25 bp, Homo sapiens
agtgtctactatttagtgccctggc

SEQ ID NO: 21561 - DNA, 25 bp, Homo sapiens
atttccctaacgatgtgctattcac

SEQ ID NO: 21562 - DNA, 25 bp, Homo sapiens
cgttcatcttcaaactcattttcca

SEQ ID NO: 21563 - DNA, 25 bp, Homo sapiens
gcgttgactgagcgagtctgttgtg

SEQ ID NO: 21564 - DNA, 25 bp, Homo sapiens
gtcactctttagactctcagtccat

SEQ ID NO: 21565 - DNA, 25 bp, Homo sapiens
gtgctattcacgttcatcttcaaac

SEQ ID NO: 21566 - DNA, 25 bp, Homo sapiens
ttagactctcagtccatcatgccat

SEQ ID NO: 21567 - DNA, 25 bp, Homo sapiens
ttattacatgcggttatttccctaa

SEQ ID NO: 21568 - DNA, 25 bp, Homo sapiens
ttctgtctgttttggattcactgct

SEQ ID NO: 21569 - DNA, 25 bp, Homo sapiens
tttccatcagccagtgtctactatt

SEQ ID NO: 21570 - DNA, 25 bp, Homo sapiens
aagccatggcattatcttcaggcaa

SEQ ID NO: 21571 - DNA, 25 bp, Homo sapiens
aaggctgaacatttaagtatcccga

SEQ ID NO: 21572 - DNA, 25 bp, Homo sapiens
cttcaggcaatttagtctgtcccaa

SEQ ID NO: 21573 - DNA, 25 bp, Homo sapiens
gccatgggtggctcaaaactttgaa

SEQ ID NO: 21574 - DNA, 25 bp, Homo sapiens
gggatcactgggagaagccatggca

SEQ ID NO: 21575 - DNA, 25 bp, Homo sapiens
ggttgcaattatataggccatgggt

SEQ ID NO: 21576 - DNA, 25 bp, Homo sapiens
gtatcccgaattttcttgaattgct

SEQ ID NO: 21577 - DNA, 25 bp, Homo sapiens
gtcaaacatacctaactttcttgca

SEQ ID NO: 21578 - DNA, 25 bp, Homo sapiens
gtcctcttgcacatctaaaaaggct

SEQ ID NO: 21579 - DNA, 25 bp, Homo sapiens
gtgtctcataggagtcctcttgcac

SEQ ID NO: 21580 - DNA, 25 bp, Homo sapiens
tgaattgctttccctatagattaat

SEQ ID NO: 21581 - DNA, 25 bp, Homo sapiens
aagatgatgtctagtgtcacctaaa

SEQ ID NO: 21582 - DNA, 25 bp, Homo sapiens
cccagtctggactccaagtcctggg

SEQ ID NO: 21583 - DNA, 25 bp, Homo sapiens
gaaatatctgtgttctgccttatgc

SEQ ID NO: 21584 - DNA, 25 bp, Homo sapiens
gggttttcactagtatgcccagtct

SEQ ID NO: 21585 - DNA, 25 bp, Homo sapiens
gtatcattccacagatattcacaga

SEQ ID NO: 21586 - DNA, 25 bp, Homo sapiens
gtgacatgtacgttgctgttttttt

SEQ ID NO: 21587 - DNA, 25 bp, Homo sapiens
tatgttgtcagtctacacttgtgga

SEQ ID NO: 21588 - DNA, 25 bp, Homo sapiens
tcaggtagatcctgggttctagaat

SEQ ID NO: 21589 - DNA, 25 bp, Homo sapiens
tcaggttcctgagtagctcaacatt

SEQ ID NO: 21590 - DNA, 25 bp, Homo sapiens
ttatgcctgtggctaagggatgcaa

SEQ ID NO: 21591 - DNA, 25 bp, Homo sapiens
ttcagctttattcaagatccacata

SEQ ID NO: 21592 - DNA, 25 bp, Homo sapiens
aaaaaggatcccttggtctctcagt

SEQ ID NO: 21593 - DNA, 25 bp, Homo sapiens
cattctagcttctgacatgccagtc

SEQ ID NO: 21594 - DNA, 25 bp, Homo sapiens
gaccattttctttggcaatcatcct

SEQ ID NO: 21595 - DNA, 25 bp, Homo sapiens
gagcaagctcagattctttctatgg

SEQ ID NO: 21596 - DNA, 25 bp, Homo sapiens
gattcacacgcctgaagggaccatc

SEQ ID NO: 21597 - DNA, 25 bp, Homo sapiens
gccacgttggaaatcagcctcagac

SEQ ID NO: 21598 - DNA, 25 bp, Homo sapiens
gccagtcaaacccatagattcacac

SEQ ID NO: 21599 - DNA, 25 bp, Homo sapiens
gccttgggttccctatggtggtgga

SEQ ID NO: 21600 - DNA, 25 bp, Homo sapiens
ggtaagatttatcctcctgacttca

SEQ ID NO: 21601 - DNA, 25 bp, Homo sapiens
tagatgtcctgggctggcattctag

SEQ ID NO: 21602 - DNA, 25 bp, Homo sapiens
tcagacaaagccacatccaagccat

SEQ ID NO: 21603 - DNA, 25 bp, Homo sapiens
aggatgaggacacactattagtttg

SEQ ID NO: 21604 - DNA, 25 bp, Homo sapiens
atataacccatagattacccagcca

SEQ ID NO: 21605 - DNA, 25 bp, Homo sapiens
atgctttgatattctcagatcagcc

SEQ ID NO: 21606 - DNA, 25 bp, Homo sapiens
attaccttctagtcctaggatgagg

SEQ ID NO: 21607 - DNA, 25 bp, Homo sapiens
cccatagattacccagccacttggg

SEQ ID NO: 21608 - DNA, 25 bp, Homo sapiens
cttccactggcagcctagctttgag

SEQ ID NO: 21609 - DNA, 25 bp, Homo sapiens
ggcagcctagctttgagggtaaatg

SEQ ID NO: 21610 - DNA, 25 bp, Homo sapiens
gggaatcactattcagggatttttc

SEQ ID NO: 21611 - DNA, 25 bp, Homo sapiens
tgatattctcagatcagccatcttg

SEQ ID NO: 21612 - DNA, 25 bp, Homo sapiens
tgtgttattcttagcttccactggc

SEQ ID NO: 21613 - DNA, 25 bp, Homo sapiens
ttttctataacattgtgtagtcagt

SEQ ID NO: 21614 - DNA, 25 bp, Homo sapiens
agttcagcaaagcaaatgccctcaa

SEQ ID NO: 21615 - DNA, 25 bp, Homo sapiens
atcccccagtcgtggtattttgtca

SEQ ID NO: 21616 - DNA, 25 bp, Homo sapiens
atgactggcatctttatatgaagag

SEQ ID NO: 21617 - DNA, 25 bp, Homo sapiens
atggtttcttttgtgattcgattat

SEQ ID NO: 21618 - DNA, 25 bp, Homo sapiens
ccagagggtacacacgcagagaaaa

SEQ ID NO: 21619 - DNA, 25 bp, Homo sapiens
gaatgtatcttattcctctgggaaa

SEQ ID NO: 21620 - DNA, 25 bp, Homo sapiens
gcaaatgccctcaatggtttctttt

SEQ ID NO: 21621 - DNA, 25 bp, Homo sapiens
ggccctagaagacaatatacaaccc

SEQ ID NO: 21622 - DNA, 25 bp, Homo sapiens
ggtattttgtcatggtggccctaga

SEQ ID NO: 21623 - DNA, 25 bp, Homo sapiens
tggtgttgtttaaatcccccagtcg

SEQ ID NO: 21624 - DNA, 25 bp, Homo sapiens
ttcatctcatcagttcagcaaagca

SEQ ID NO: 21625 - DNA, 25 bp, Homo sapiens
aatagaaacccgtggacgctccaat

SEQ ID NO: 21626 - DNA, 25 bp, Homo sapiens
accccattgatcgccaggattgatt

SEQ ID NO: 21627 - DNA, 25 bp, Homo sapiens
ctgctggcacttccaaacaagctca

SEQ ID NO: 21628 - DNA, 25 bp, Homo sapiens
gacgagaggacgaccttctctgata

SEQ ID NO: 21629 - DNA, 25 bp, Homo sapiens
gacgctccaatgggcttgtcatgat

SEQ ID NO: 21630 - DNA, 25 bp, Homo sapiens
gacgctccagatttgagggtactct

SEQ ID NO: 21631 - DNA, 25 bp, Homo sapiens
gctcatttttcaaagacgctccaga

SEQ ID NO: 21632 - DNA, 25 bp, Homo sapiens
gtactctgactgcaacatctatcac

SEQ ID NO: 21633 - DNA, 25 bp, Homo sapiens
tatcaggctaggctttcctgctcat

SEQ ID NO: 21634 - DNA, 25 bp, Homo sapiens
tggacactggactgcatgcacttta

SEQ ID NO: 21635 - DNA, 25 bp, Homo sapiens
ttggttgatctggctgagcaggcgg

SEQ ID NO: 21636 - DNA, 25 bp, Homo sapiens
acagccagttcatagtgggacttgt

SEQ ID NO: 21637 - DNA, 25 bp, Homo sapiens
acagtagaaaccagacttgccttga

SEQ ID NO: 21638 - DNA, 25 bp, Homo sapiens
cactcaaactcccaaagcgcatgat

SEQ ID NO: 21639 - DNA, 25 bp, Homo sapiens
caggatgcaacctgctttcaccaga

SEQ ID NO: 21640 - DNA, 25 bp, Homo sapiens
cccaaggcgccaggatgcaacctgc

SEQ ID NO: 21641 - DNA, 25 bp, Homo sapiens
ccgagagacacggtctggacagccc

SEQ ID NO: 21642 - DNA, 25 bp, Homo sapiens
cctgctccgaggactcttagttttt

SEQ ID NO: 21643 - DNA, 25 bp, Homo sapiens
ctctctcgccttcgtaattattcta

SEQ ID NO: 21644 - DNA, 25 bp, Homo sapiens
gacagagtatgtgagcctttgccga

SEQ ID NO: 21645 - DNA, 25 bp, Homo sapiens
gagcctttgccgaacaaacaaacgt

SEQ ID NO: 21646 - DNA, 25 bp, Homo sapiens
gggacttaccagggttagctctgcc

SEQ ID NO: 21647 - DNA, 25 bp, Homo sapiens
aaaattctgtagatgcacttattga

SEQ ID NO: 21648 - DNA, 25 bp, Homo sapiens
aatacggaaatcgctgtgggagaag

SEQ ID NO: 21649 - DNA, 25 bp, Homo sapiens
atgtaatctttccaatgctccaatg

SEQ ID NO: 21650 - DNA, 25 bp, Homo sapiens
ctaggagtcctgaactgctgacgcg

SEQ ID NO: 21651 - DNA, 25 bp, Homo sapiens
gaaagaggcgcagttcccaattaat

SEQ ID NO: 21652 - DNA, 25 bp, Homo sapiens
gaaagcctaggagaagccgatttgg

SEQ ID NO: 21653 - DNA, 25 bp, Homo sapiens
gattaggatctacgtctgagactag

SEQ ID NO: 21654 - DNA, 25 bp, Homo sapiens
gcattctgatgcttgtgatgaacac

SEQ ID NO: 21655 - DNA, 25 bp, Homo sapiens
gccgatttggaggttaatgctgtag

SEQ ID NO: 21656 - DNA, 25 bp, Homo sapiens
ggtcattatcgtgtctgttggtgaa

SEQ ID NO: 21657 - DNA, 25 bp, Homo sapiens
tgacgcgaaagaggcgcagttccca

SEQ ID NO: 21658 - DNA, 25 bp, Homo sapiens
acagcaattctttagttccagccac

SEQ ID NO: 21659 - DNA, 25 bp, Homo sapiens
agcgatttgttagcacagagtcaca

SEQ ID NO: 21660 - DNA, 25 bp, Homo sapiens
agtggtcagcctacgagttaatcct

SEQ ID NO: 21661 - DNA, 25 bp, Homo sapiens
atagctagccttattttgggggtat

SEQ ID NO: 21662 - DNA, 25 bp, Homo sapiens
atgatacttgggaatgtttctccct

SEQ ID NO: 21663 - DNA, 25 bp, Homo sapiens
ccattcgccccactggacaatagcg

SEQ ID NO: 21664 - DNA, 25 bp, Homo sapiens
gcatggctctgagccttcatgccga

SEQ ID NO: 21665 - DNA, 25 bp, Homo sapiens
gccgagcagacgttattcacatgac

SEQ ID NO: 21666 - DNA, 25 bp, Homo sapiens
gtgggacacaaagcttggagctgca

SEQ ID NO: 21667 - DNA, 25 bp, Homo sapiens
ttaatccttcctagcatggctctga

SEQ ID NO: 21668 - DNA, 25 bp, Homo sapiens
tttctccctcgtaccacaaaggatg

SEQ ID NO: 21669 - DNA, 25 bp, Homo sapiens
aagtgccttacgtgagtgtgtcatc

SEQ ID NO: 21670 - DNA, 25 bp, Homo sapiens
aatcattcaccactcacagggtcaa

SEQ ID NO: 21671 - DNA, 25 bp, Homo sapiens
acattaatgtactcacgtccaagga

SEQ ID NO: 21672 - DNA, 25 bp, Homo sapiens
catgctgaacctgactatttagaag

SEQ ID NO: 21673 - DNA, 25 bp, Homo sapiens
gaagtccatcctttggtccaaagca

SEQ ID NO: 21674 - DNA, 25 bp, Homo sapiens
gctcagctccagcctgatatggagg

SEQ ID NO: 21675 - DNA, 25 bp, Homo sapiens
gggctttcgcagaaatgctgtgatt

SEQ ID NO: 21676 - DNA, 25 bp, Homo sapiens
gtgattctgttttaagtccatacct

SEQ ID NO: 21677 - DNA, 25 bp, Homo sapiens
gtgtgtcatcaatcagaacctaagc

SEQ ID NO: 21678 - DNA, 25 bp, Homo sapiens
tggaggcacattatcctggagccca

SEQ ID NO: 21679 - DNA, 25 bp, Homo sapiens
tttatccttccaagatgccagctca

SEQ ID NO: 21680 - DNA, 25 bp, Homo sapiens
agtgacccttaacactacacttctc

SEQ ID NO: 21681 - DNA, 25 bp, Homo sapiens
ctacacttctccttatctttattgg

SEQ ID NO: 21682 - DNA, 25 bp, Homo sapiens
gaaaaatagcatatgccttggagga

SEQ ID NO: 21683 - DNA, 25 bp, Homo sapiens
gcccataagcacatcagtacttttc

SEQ ID NO: 21684 - DNA, 25 bp, Homo sapiens
gtatggtacatctacctaaaggact

SEQ ID NO: 21685 - DNA, 25 bp, Homo sapiens
gtgggaggcaagtgacccttaacac

SEQ ID NO: 21686 - DNA, 25 bp, Homo sapiens
taaaacccaacatgcttattacatt

SEQ ID NO: 21687 - DNA, 25 bp, Homo sapiens
taaagactaccataaaacccaacat

SEQ ID NO: 21688 - DNA, 25 bp, Homo sapiens
tacttttctctggctggaatagtaa

SEQ ID NO: 21689 - DNA, 25 bp, Homo sapiens
tgatttagtgttgtccctactttct

SEQ ID NO: 21690 - DNA, 25 bp, Homo sapiens
tttccagttgcccataagcacatca

SEQ ID NO: 21691 - DNA, 25 bp, Homo sapiens
attagtagtccactttatgcttaaa

SEQ ID NO: 21692 - DNA, 25 bp, Homo sapiens
caaactgcccgtttagagtcctgtt

SEQ ID NO: 21693 - DNA, 25 bp, Homo sapiens
catcgttcttagcctacattgtcat

SEQ ID NO: 21694 - DNA, 25 bp, Homo sapiens
cattagggtttacttggttgtggca

SEQ ID NO: 21695 - DNA, 25 bp, Homo sapiens
cctacattgtcatttatatcaccaa

SEQ ID NO: 21696 - DNA, 25 bp, Homo sapiens
ctaacactgggtctgcttatgctag

SEQ ID NO: 21697 - DNA, 25 bp, Homo sapiens
gagtcctgttaatattgatgtccta

SEQ ID NO: 21698 - DNA, 25 bp, Homo sapiens
gataaactttcatcgttcttagcct

SEQ ID NO: 21699 - DNA, 25 bp, Homo sapiens
gggtctgcttatgctagttcagtat

SEQ ID NO: 21700 - DNA, 25 bp, Homo sapiens
gtatttggtctaggcttcattttga

SEQ ID NO: 21701 - DNA, 25 bp, Homo sapiens
ttctatctctaggcaacatgtcttt

SEQ ID NO: 21702 - DNA, 25 bp, Homo sapiens
aacatggaacccctgatgtctttag

SEQ ID NO: 21703 - DNA, 25 bp, Homo sapiens
cagccatcttgggccatgtggtagc

SEQ ID NO: 21704 - DNA, 25 bp, Homo sapiens
gcacatcgccacccagaataaaaac

SEQ ID NO: 21705 - DNA, 25 bp, Homo sapiens
ggcagccctgggataaattctggac

SEQ ID NO: 21706 - DNA, 25 bp, Homo sapiens
gggaccttaaacagaagtgtgccct

SEQ ID NO: 21707 - DNA, 25 bp, Homo sapiens
gtctagatttacctccaaactttgt

SEQ ID NO: 21708 - DNA, 25 bp, Homo sapiens
tacatactactacagcctcttttac

SEQ ID NO: 21709 - DNA, 25 bp, Homo sapiens
tcctcctttaacatggaacccctga

SEQ ID NO: 21710 - DNA, 25 bp, Homo sapiens
tgcagctaggggcagccctgggata

SEQ ID NO: 21711 - DNA, 25 bp, Homo sapiens
tgtctttagcttggcacatcgccac

SEQ ID NO: 21712 - DNA, 25 bp, Homo sapiens
tgtggtagcttcttatggatgatct

SEQ ID NO: 21713 - DNA, 25 bp, Homo sapiens
aacaccagtgtattttcagggaatg

SEQ ID NO: 21714 - DNA, 25 bp, Homo sapiens
acttccaggcttcatcctagagact

SEQ ID NO: 21715 - DNA, 25 bp, Homo sapiens
caggcgcggggaagcatgtggtacc

SEQ ID NO: 21716 - DNA, 25 bp, Homo sapiens
cagggaatgtccctaactgcgtctt

SEQ ID NO: 21717 - DNA, 25 bp, Homo sapiens
ccctaacaacaaccacagtgttgct

SEQ ID NO: 21718 - DNA, 25 bp, Homo sapiens
ctcagcagaaagggacagcctgtcc

SEQ ID NO: 21719 - DNA, 25 bp, Homo sapiens
gactgtgtctgaaacaccagtgtat

SEQ ID NO: 21720 - DNA, 25 bp, Homo sapiens
gcgacatcttttggttctggatagt

SEQ ID NO: 21721 - DNA, 25 bp, Homo sapiens
gggacagcctgtccttagaggactg

SEQ ID NO: 21722 - DNA, 25 bp, Homo sapiens
tcatcctagagactgtcatctccca

SEQ ID NO: 21723 - DNA, 25 bp, Homo sapiens
tggagaaaactggggagggcgcaac

SEQ ID NO: 21724 - DNA, 25 bp, Homo sapiens
agaggctatagctcacattttcaat

SEQ ID NO: 21725 - DNA, 25 bp, Homo sapiens
cattttcaatcctctatttcttttt

SEQ ID NO: 21726 - DNA, 25 bp, Homo sapiens
ctcttcctcctagtcaataaaccca

SEQ ID NO: 21727 - DNA, 25 bp, Homo sapiens
ctttctactgctgttgacatcttct

SEQ ID NO: 21728 - DNA, 25 bp, Homo sapiens
gacatcttcttattacagcaacacc

SEQ ID NO: 21729 - DNA, 25 bp, Homo sapiens
gacccaaagatgttattttctgctg

SEQ ID NO: 21730 - DNA, 25 bp, Homo sapiens
gcaacaccattctaggagtttcctg

SEQ ID NO: 21731 - DNA, 25 bp, Homo sapiens
gtcattttcagtttgaggcaaccaa

SEQ ID NO: 21732 - DNA, 25 bp, Homo sapiens
tattccaccataaaacagctgagtt

SEQ ID NO: 21733 - DNA, 25 bp, Homo sapiens
tgatctcggttttcttacactgtga

SEQ ID NO: 21734 - DNA, 25 bp, Homo sapiens
tgatgatctatttcccagcttatcc

SEQ ID NO: 21735 - DNA, 25 bp, Homo sapiens
aaatcccagatcctctgcaatctac

SEQ ID NO: 21736 - DNA, 25 bp, Homo sapiens
aaatgccagatcactcagagcctat

SEQ ID NO: 21737 - DNA, 25 bp, Homo sapiens
aagcctaggtcttagtcctacactc

SEQ ID NO: 21738 - DNA, 25 bp, Homo sapiens
actccttctaatttgctgtgtaacc

SEQ ID NO: 21739 - DNA, 25 bp, Homo sapiens
agctgggaagcctggaatgacctct

SEQ ID NO: 21740 - DNA, 25 bp, Homo sapiens
atatcaacaccaggtctctagcacc

SEQ ID NO: 21741 - DNA, 25 bp, Homo sapiens
ctagctctgccttcaggcatgcaat

SEQ ID NO: 21742 - DNA, 25 bp, Homo sapiens
gaatgacctcttgcacaagcctaaa

SEQ ID NO: 21743 - DNA, 25 bp, Homo sapiens
ggcagtagctcatcacttgggtagc

SEQ ID NO: 21744 - DNA, 25 bp, Homo sapiens
gtgtaaccttaccattaatctctct

SEQ ID NO: 21745 - DNA, 25 bp, Homo sapiens
tacccattttaggaccctacactca

SEQ ID NO: 21746 - DNA, 25 bp, Homo sapiens
aagaagtatgtctcacttgggaact

SEQ ID NO: 21747 - DNA, 25 bp, Homo sapiens
aagttatatttttcacacagagatg

SEQ ID NO: 21748 - DNA, 25 bp, Homo sapiens
aatctcatgacagattataccttcc

SEQ ID NO: 21749 - DNA, 25 bp, Homo sapiens
atatttttctgcccagaattatcta

SEQ ID NO: 21750 - DNA, 25 bp, Homo sapiens
atcaactctaaatcagttttgtcac

SEQ ID NO: 21751 - DNA, 25 bp, Homo sapiens
ctcacttgggaactgaatcaactct

SEQ ID NO: 21752 - DNA, 25 bp, Homo sapiens
gatgatgctatattacaccttccct

SEQ ID NO: 21753 - DNA, 25 bp, Homo sapiens
gattataccttccttattacttgtt

SEQ ID NO: 21754 - DNA, 25 bp, Homo sapiens
ggtttcttaaactctaatctcatga

SEQ ID NO: 21755 - DNA, 25 bp, Homo sapiens
gttttatcttactcagaatctttga

SEQ ID NO: 21756 - DNA, 25 bp, Homo sapiens
tttctcttttttcaattctatgaat

SEQ ID NO: 21757 - DNA, 25 bp, Homo sapiens
agccgtggggacagcgtgaaggtgt

SEQ ID NO: 21758 - DNA, 25 bp, Homo sapiens
caggatgggaccaaagtcaaggcct

SEQ ID NO: 21759 - DNA, 25 bp, Homo sapiens
cagggcttcttcctgcaacaagtcg

SEQ ID NO: 21760 - DNA, 25 bp, Homo sapiens
ccagacgtctggtccagggcagaca

SEQ ID NO: 21761 - DNA, 25 bp, Homo sapiens
ccccaggcactgggaggccctgggt

SEQ ID NO: 21762 - DNA, 25 bp, Homo sapiens
ccgtgtctcagtgcaggtggagccg

SEQ ID NO: 21763 - DNA, 25 bp, Homo sapiens
cctggtggccctgggagccaggatg

SEQ ID NO: 21764 - DNA, 25 bp, Homo sapiens
gtcaaggcctggggcatggctgagt

SEQ ID NO: 21765 - DNA, 25 bp, Homo sapiens
gttcctgggccaggaggctggctgc

SEQ ID NO: 21766 - DNA, 25 bp, Homo sapiens
tctggtccagggcagacacattcct

SEQ ID NO: 21767 - DNA, 25 bp, Homo sapiens
tggggcatggctgagtaccccagac

SEQ ID NO: 21768 - DNA, 25 bp, Homo sapiens
aactcattgttttttcaacgtgaca

SEQ ID NO: 21769 - DNA, 25 bp, Homo sapiens
aataaaagccctgagctgggcgcgg

SEQ ID NO: 21770 - DNA, 25 bp, Homo sapiens
agacggagccagtgacagctcagct

SEQ ID NO: 21771 - DNA, 25 bp, Homo sapiens
agggaggatggcacgagtcccttgc

SEQ ID NO: 21772 - DNA, 25 bp, Homo sapiens
cctcaccaaactggccgctagagag

SEQ ID NO: 21773 - DNA, 25 bp, Homo sapiens
gatcctcattgtaattttggagcta

SEQ ID NO: 21774 - DNA, 25 bp, Homo sapiens
ggaggctttagacggagccagtgac

SEQ ID NO: 21775 - DNA, 25 bp, Homo sapiens
tccaggcttctgatcctcattgtaa

SEQ ID NO: 21776 - DNA, 25 bp, Homo sapiens
ttccttccttcattggaggctttag

SEQ ID NO: 21777 - DNA, 25 bp, Homo sapiens
ttctcctaccaactcattgtttttt

SEQ ID NO: 21778 - DNA, 25 bp, Homo sapiens
tttggtgatattgtctttgtccttg

SEQ ID NO: 21779 - DNA, 25 bp, Homo sapiens
acatagtaaatatctttggctttgt

SEQ ID NO: 21780 - DNA, 25 bp, Homo sapiens
caccgccttggccagaagaggcacc

SEQ ID NO: 21781 - DNA, 25 bp, Homo sapiens
cagaggtcagcggaccttttctgta

SEQ ID NO: 21782 - DNA, 25 bp, Homo sapiens
ccagtgggcttggctgtgtgccaat

SEQ ID NO: 21783 - DNA, 25 bp, Homo sapiens
cccgcctgcagaatcacaagtgaaa

SEQ ID NO: 21784 - DNA, 25 bp, Homo sapiens
gacaatgtgtcatccagtgggcttg

SEQ ID NO: 21785 - DNA, 25 bp, Homo sapiens
gattgttgctttgagtcagaggtca

SEQ ID NO: 21786 - DNA, 25 bp, Homo sapiens
gcaagatgagccgtggacaatgtgt

SEQ ID NO: 21787 - DNA, 25 bp, Homo sapiens
gtctgtcacattagtgaaccctgct

SEQ ID NO: 21788 - DNA, 25 bp, Homo sapiens
gtgaaccctgctattgtattgcaag

SEQ ID NO: 21789 - DNA, 25 bp, Homo sapiens
tgtgagccacaccatgtctgtcaca

SEQ ID NO: 21790 - DNA, 25 bp, Homo sapiens
accaattgcctcttatcggttatcc

SEQ ID NO: 21791 - DNA, 25 bp, Homo sapiens
acggtgagaccgcagtgagaatgat

SEQ ID NO: 21792 - DNA, 25 bp, Homo sapiens
acgtgactggtgttggtctgttgat

SEQ ID NO: 21793 - DNA, 25 bp, Homo sapiens
agctgccaaattatacgaatgccat

SEQ ID NO: 21794 - DNA, 25 bp, Homo sapiens
cgaatgccatttatttacgtgactg

SEQ ID NO: 21795 - DNA, 25 bp, Homo sapiens
ctttctcttcattcgctgtaatggg

SEQ ID NO: 21796 - DNA, 25 bp, Homo sapiens
ggctcttaagccagaaaccaattgc

SEQ ID NO: 21797 - DNA, 25 bp, Homo sapiens
ggttatccccaactgtagatcttct

SEQ ID NO: 21798 - DNA, 25 bp, Homo sapiens
tctcctctcattagtctaccatgac

SEQ ID NO: 21799 - DNA, 25 bp, Homo sapiens
ttattgttaaactctcacaactgat

SEQ ID NO: 21800 - DNA, 25 bp, Homo sapiens
tttacgatgttctttctcttcattc

SEQ ID NO: 21801 - DNA, 25 bp, Homo sapiens
aaagcaacgatttagccagtctgga

SEQ ID NO: 21802 - DNA, 25 bp, Homo sapiens
agcctcatgcttcacttgcaaagtg

SEQ ID NO: 21803 - DNA, 25 bp, Homo sapiens
caaaggttctttctctatgtctcct

SEQ ID NO: 21804 - DNA, 25 bp, Homo sapiens
cataaccacgggacgagtgccttgc

SEQ ID NO: 21805 - DNA, 25 bp, Homo sapiens
ctagttcttcacggttccaaagctt

SEQ ID NO: 21806 - DNA, 25 bp, Homo sapiens
gccacacccatacgagagaggatct

SEQ ID NO: 21807 - DNA, 25 bp, Homo sapiens
gcgcaattccttaccgaattttctc

SEQ ID NO: 21808 - DNA, 25 bp, Homo sapiens
gcttattgtactgtggtgctttgca

SEQ ID NO: 21809 - DNA, 25 bp, Homo sapiens
gggcctccatacagtcagttggtgg

SEQ ID NO: 21810 - DNA, 25 bp, Homo sapiens
ggtgctttgcaatgcaaccctgcaa

SEQ ID NO: 21811 - DNA, 25 bp, Homo sapiens
tgaatacctcagcttcaactgggcc

SEQ ID NO: 21812 - DNA, 25 bp, Homo sapiens
aaatcctgaatgctttttcactgaa

SEQ ID NO: 21813 - DNA, 25 bp, Homo sapiens
atttcccggagttggttgcatgcat

SEQ ID NO: 21814 - DNA, 25 bp, Homo sapiens
atttctcagagctgtggtctacctg

SEQ ID NO: 21815 - DNA, 25 bp, Homo sapiens
catgctagtgtttcaagtattgtat

SEQ ID NO: 21816 - DNA, 25 bp, Homo sapiens
gaatgatgtcaccagagctctgaga

SEQ ID NO: 21817 - DNA, 25 bp, Homo sapiens
gaatttactttacatgctagtgttt

SEQ ID NO: 21818 - DNA, 25 bp, Homo sapiens
gaatttccaggataatttcccggag

SEQ ID NO: 21819 - DNA, 25 bp, Homo sapiens
gaggattttcacaatagtatcactg

SEQ ID NO: 21820 - DNA, 25 bp, Homo sapiens
ggtctacctgtatcattaatttcaa

SEQ ID NO: 21821 - DNA, 25 bp, Homo sapiens
gttaactgttttatggggacattga

SEQ ID NO: 21822 - DNA, 25 bp, Homo sapiens
tggttgcatgcattatctttcataa

SEQ ID NO: 21823 - DNA, 25 bp, Homo sapiens
aaagcctgactatttctatttggaa

SEQ ID NO: 21824 - DNA, 25 bp, Homo sapiens
actggcatttaccgtttttcacatt

SEQ ID NO: 21825 - DNA, 25 bp, Homo sapiens
acttttctatgcattctatcattga

SEQ ID NO: 21826 - DNA, 25 bp, Homo sapiens
atcattgatttgacacacttcatag

SEQ ID NO: 21827 - DNA, 25 bp, Homo sapiens
atttaagctgttctcttttatactg

SEQ ID NO: 21828 - DNA, 25 bp, Homo sapiens
gaattttcaaaactgttcgtgtctt

SEQ ID NO: 21829 - DNA, 25 bp, Homo sapiens
gtagtattcttaacctgttctatat

SEQ ID NO: 21830 - DNA, 25 bp, Homo sapiens
gttcatctgcgtttagtaccatttt

SEQ ID NO: 21831 - DNA, 25 bp, Homo sapiens
gttcgtgtcttcagttcattctgtc

SEQ ID NO: 21832 - DNA, 25 bp, Homo sapiens
taaatactctacgtttggttcaatt

SEQ ID NO: 21833 - DNA, 25 bp, Homo sapiens
ttctgtcataactttgctattgtaa

SEQ ID NO: 21834 - DNA, 25 bp, Homo sapiens
aaatcttgatacttcataccataca

SEQ ID NO: 21835 - DNA, 25 bp, Homo sapiens
gaatatttcctggacctgagctagg

SEQ ID NO: 21836 - DNA, 25 bp, Homo sapiens
gatccacgcagatatggccaattga

SEQ ID NO: 21837 - DNA, 25 bp, Homo sapiens
gcagcacagtgttaggcttactttt

SEQ ID NO: 21838 - DNA, 25 bp, Homo sapiens
ggacctgagctaggcaaagatttca

SEQ ID NO: 21839 - DNA, 25 bp, Homo sapiens
ggagtccagaactagatccacgcag

SEQ ID NO: 21840 - DNA, 25 bp, Homo sapiens
ggccaattgatcttccaaaaaggca

SEQ ID NO: 21841 - DNA, 25 bp, Homo sapiens
ttaaccaccagacctagaaaacttg

SEQ ID NO: 21842 - DNA, 25 bp, Homo sapiens
ttccaagggctttttctcattcatt

SEQ ID NO: 21843 - DNA, 25 bp, Homo sapiens
ttctacctaaatttgcccatcaaat

SEQ ID NO: 21844 - DNA, 25 bp, Homo sapiens
ttctcattcattatcctatgctgtc

SEQ ID NO: 21845 - DNA, 25 bp, Homo sapiens
agagcagaagaagcacgccgaggcc

SEQ ID NO: 21846 - DNA, 25 bp, Homo sapiens
agagctacaagcgccagtttgagga

SEQ ID NO: 21847 - DNA, 25 bp, Homo sapiens
agcacaaggagtgacggcctgaccc

SEQ ID NO: 21848 - DNA, 25 bp, Homo sapiens
agcatgagcgccgtgtcaaggagct

SEQ ID NO: 21849 - DNA, 25 bp, Homo sapiens
agctggatgatgcggaggagcgggc

SEQ ID NO: 21850 - DNA, 25 bp, Homo sapiens
aggaatgtctgctgttgcacatctg

SEQ ID NO: 21851 - DNA, 25 bp, Homo sapiens
cgtgtcaaggagctcgcataccagg

SEQ ID NO: 21852 - DNA, 25 bp, Homo sapiens
gccgaggcccttaagggcgtgcgca

SEQ ID NO: 21853 - DNA, 25 bp, Homo sapiens
ggacaaaagccaggtccacagcagt

SEQ ID NO: 21854 - DNA, 25 bp, Homo sapiens
ggcagacatggcggaaacccaggcc

SEQ ID NO: 21855 - DNA, 25 bp, Homo sapiens
tgaccccctgggctctaaagaggaa

SEQ ID NO: 21856 - DNA, 25 bp, Homo sapiens
gaatgattttctccgtactgactat

SEQ ID NO: 21857 - DNA, 25 bp, Homo sapiens
gatgcagccttagaggtgcaacctc

SEQ ID NO: 21858 - DNA, 25 bp, Homo sapiens
gatggagtcctcaattgcacaatcc

SEQ ID NO: 21859 - DNA, 25 bp, Homo sapiens
gcaacctccagacacatgggacagt

SEQ ID NO: 21860 - DNA, 25 bp, Homo sapiens
gcacaatccattcacaggggctttg

SEQ ID NO: 21861 - DNA, 25 bp, Homo sapiens
gggtcaggcacctcagaagatctgt

SEQ ID NO: 21862 - DNA, 25 bp, Homo sapiens
gtttgccccacttgttgttagatat

SEQ ID NO: 21863 - DNA, 25 bp, Homo sapiens
gttttccactatttcagctgctgaa

SEQ ID NO: 21864 - DNA, 25 bp, Homo sapiens
tgagcgggagtcatgggaaccagtc

SEQ ID NO: 21865 - DNA, 25 bp, Homo sapiens
tggagcatgcggagacgttcctgtc

SEQ ID NO: 21866 - DNA, 25 bp, Homo sapiens
ttttggaaacttgacgcccttcaga

SEQ ID NO: 21867 - DNA, 25 bp, Homo sapiens
acccaagagcatgacacaccctggt

SEQ ID NO: 21868 - DNA, 25 bp, Homo sapiens
agatgctccaagagaagtccccacc

SEQ ID NO: 21869 - DNA, 25 bp, Homo sapiens
agcaccctggcatgagatctgagac

SEQ ID NO: 21870 - DNA, 25 bp, Homo sapiens
cagtgtgggatcctggaatggcact

SEQ ID NO: 21871 - DNA, 25 bp, Homo sapiens
gacccgtacttaacttctaggactg

SEQ ID NO: 21872 - DNA, 25 bp, Homo sapiens
gacgtcaactacagccgagggtgct

SEQ ID NO: 21873 - DNA, 25 bp, Homo sapiens
ggaatggcactgcacatgtctgcat

SEQ ID NO: 21874 - DNA, 25 bp, Homo sapiens
ggtgagcagtaacacataccctctt

SEQ ID NO: 21875 - DNA, 25 bp, Homo sapiens
taatgcggctctaggccggctgagg

SEQ ID NO: 21876 - DNA, 25 bp, Homo sapiens
ttggagaactagtgtgaccccaccc

SEQ ID NO: 21877 - DNA, 25 bp, Homo sapiens
tttgctcttctctaacttaccaaca

SEQ ID NO: 21878 - DNA, 25 bp, Homo sapiens
aaagtaaaactgtgcactggtacca

SEQ ID NO: 21879 - DNA, 25 bp, Homo sapiens
atgaggccgactatttctgtcagct

SEQ ID NO: 21880 - DNA, 25 bp, Homo sapiens
cagcagggtcgaggtcggggatgag

SEQ ID NO: 21881 - DNA, 25 bp, Homo sapiens
catcagcagggtcgaggtcggggat

SEQ ID NO: 21882 - DNA, 25 bp, Homo sapiens
cccctattctggtcatctattataa

SEQ ID NO: 21883 - DNA, 25 bp, Homo sapiens
ctgtgggggggacaatattgaaagt

SEQ ID NO: 21884 - DNA, 25 bp, Homo sapiens
ggatgaggccgactatttctgtcag

SEQ ID NO: 21885 - DNA, 25 bp, Homo sapiens
ggggatgaggccgactatttctgtc

SEQ ID NO: 21886 - DNA, 25 bp, Homo sapiens
gtcagctgtgggatataagtagtgg

SEQ ID NO: 21887 - DNA, 25 bp, Homo sapiens
tctattataatttcgaccggccctc

SEQ ID NO: 21888 - DNA, 25 bp, Homo sapiens
tctgtcagctgtgggatataagtag

SEQ ID NO: 21889 - DNA, 25 bp, Homo sapiens
aatatgcttcctggtatcaacagag

SEQ ID NO: 21890 - DNA, 25 bp, Homo sapiens
cagcttcacctgctctggagataaa

SEQ ID NO: 21891 - DNA, 25 bp, Homo sapiens
caggacagacagccagcttcacctg

SEQ ID NO: 21892 - DNA, 25 bp, Homo sapiens
ccatcagcgggacccaggctatgga

SEQ ID NO: 21893 - DNA, 25 bp, Homo sapiens
cccctgtactggtcatctatcaaga

SEQ ID NO: 21894 - DNA, 25 bp, Homo sapiens
ccctcagggatccctgaccgattct

SEQ ID NO: 21895 - DNA, 25 bp, Homo sapiens
ctatcaagatgccaagcggccctca

SEQ ID NO: 21896 - DNA, 25 bp, Homo sapiens
ggctatggatgaggctgactattac

SEQ ID NO: 21897 - DNA, 25 bp, Homo sapiens
gtcaggcgtgggacaacacccatgt

SEQ ID NO: 21898 - DNA, 25 bp, Homo sapiens
tatcaacagagaccaggccagtccc

SEQ ID NO: 21899 - DNA, 25 bp, Homo sapiens
tctggaaacacagccactctgacca

SEQ ID NO: 21900 - DNA, 25 bp, Homo sapiens
aagatgcatctgtcttatccactac

SEQ ID NO: 21901 - DNA, 25 bp, Homo sapiens
aatattgccatccttgggtcatcaa

SEQ ID NO: 21902 - DNA, 25 bp, Homo sapiens
cactaccatgtcctaccacataatg

SEQ ID NO: 21903 - DNA, 25 bp, Homo sapiens
gaaagggagctagcagacattccta

SEQ ID NO: 21904 - DNA, 25 bp, Homo sapiens
gacattcctagctgataatattgcc

SEQ ID NO: 21905 - DNA, 25 bp, Homo sapiens
gcctacctcgaagctcaaattttgt

SEQ ID NO: 21906 - DNA, 25 bp, Homo sapiens
ggcactgtttgtttctgttaatttc

SEQ ID NO: 21907 - DNA, 25 bp, Homo sapiens
ggcttcaattacgattccaggactg

SEQ ID NO: 21908 - DNA, 25 bp, Homo sapiens
gtgtctggcactagttgaggcgtaa

SEQ ID NO: 21909 - DNA, 25 bp, Homo sapiens
gttgttgaaagagcctcatccaggc

SEQ ID NO: 21910 - DNA, 25 bp, Homo sapiens
tagcatcctaaccctgtttagcaca

SEQ ID NO: 21911 - DNA, 25 bp, Homo sapiens
aatgtagacatgactctcctgtgca

SEQ ID NO: 21912 - DNA, 25 bp, Homo sapiens
aattcatatgtgcactgtataagag

SEQ ID NO: 21913 - DNA, 25 bp, Homo sapiens
agatgttgacttggatttatttaaa

SEQ ID NO: 21914 - DNA, 25 bp, Homo sapiens
atattgctagtttcatgcttcctcc

SEQ ID NO: 21915 - DNA, 25 bp, Homo sapiens
atgactctcctgtgcaaattattta

SEQ ID NO: 21916 - DNA, 25 bp, Homo sapiens
atgtattcatctcatggcataaatt

SEQ ID NO: 21917 - DNA, 25 bp, Homo sapiens
atttattcgttgtgtatattgcttt

SEQ ID NO: 21918 - DNA, 25 bp, Homo sapiens
gcctgtgtagatttcatttattggt

SEQ ID NO: 21919 - DNA, 25 bp, Homo sapiens
ggactttctccattatcactggatt

SEQ ID NO: 21920 - DNA, 25 bp, Homo sapiens
gtattcccatactagacagtgttat

SEQ ID NO: 21921 - DNA, 25 bp, Homo sapiens
gttagcatttttatggactttctcc

SEQ ID NO: 21922 - DNA, 25 bp, Homo sapiens
aaaactgtactacttgatgtattat

SEQ ID NO: 21923 - DNA, 25 bp, Homo sapiens
aaggtgtattcaggatcctcaaagc

SEQ ID NO: 21924 - DNA, 25 bp, Homo sapiens
aattttgctgcattgttaaactgta

SEQ ID NO: 21925 - DNA, 25 bp, Homo sapiens
acagtctagagcacatgcagctaac

SEQ ID NO: 21926 - DNA, 25 bp, Homo sapiens
agaagctagatcctgtgcagcagcc

SEQ ID NO: 21927 - DNA, 25 bp, Homo sapiens
atgtatctgcattttttacacaaaa

SEQ ID NO: 21928 - DNA, 25 bp, Homo sapiens
caaagcattttaaccttgccgctta

SEQ ID NO: 21929 - DNA, 25 bp, Homo sapiens
ctttcaatgtgcccatcttaggtgg

SEQ ID NO: 21930 - DNA, 25 bp, Homo sapiens
ggctcgctctacagtctagagcaca

SEQ ID NO: 21931 - DNA, 25 bp, Homo sapiens
tgcagctaacttgtgcctctgctta

SEQ ID NO: 21932 - DNA, 25 bp, Homo sapiens
ttaacaaccataaccttcatttgaa

SEQ ID NO: 21933 - DNA, 25 bp, Homo sapiens
aagactgtcagtaatcctgaagatg

SEQ ID NO: 21934 - DNA, 25 bp, Homo sapiens
aagagtaggatctgttaggattagt

SEQ ID NO: 21935 - DNA, 25 bp, Homo sapiens
acaaggctgtatcttctgccactgt

SEQ ID NO: 21936 - DNA, 25 bp, Homo sapiens
aggattagtcataagactgtcagta

SEQ ID NO: 21937 - DNA, 25 bp, Homo sapiens
aggctgtatcttctgccactgtaat

SEQ ID NO: 21938 - DNA, 25 bp, Homo sapiens
atacctggctccaaaacaaggctgt

SEQ ID NO: 21939 - DNA, 25 bp, Homo sapiens
atagatgcaattgaggttcataaat

SEQ ID NO: 21940 - DNA, 25 bp, Homo sapiens
atgagataatccaggcccaggttcc

SEQ ID NO: 21941 - DNA, 25 bp, Homo sapiens
gaacgaatacgtgggtgtatctgta

SEQ ID NO: 21942 - DNA, 25 bp, Homo sapiens
gagagacatacctggctccaaaaca

SEQ ID NO: 21943 - DNA, 25 bp, Homo sapiens
gggtgtatctgtaagagtaggatct

SEQ ID NO: 21944 - DNA, 25 bp, Homo sapiens
atgtcatgtacaactcttataaaca

SEQ ID NO: 21945 - DNA, 25 bp, Homo sapiens
catctttcagtaaagtcttgtcaga

SEQ ID NO: 21946 - DNA, 25 bp, Homo sapiens
gaaacacagttattgaatctactct

SEQ ID NO: 21947 - DNA, 25 bp, Homo sapiens
gaatctactcttgtcattaacattt

SEQ ID NO: 21948 - DNA, 25 bp, Homo sapiens
gaattttagttatctgttggacatt

SEQ ID NO: 21949 - DNA, 25 bp, Homo sapiens
gacacttgcatgttgatatgcctat

SEQ ID NO: 21950 - DNA, 25 bp, Homo sapiens
taatatttggtacatgacacttgca

SEQ ID NO: 21951 - DNA, 25 bp, Homo sapiens
tgcacttcatctttcagtaaagtct

SEQ ID NO: 21952 - DNA, 25 bp, Homo sapiens
ttacagggttcccatttgcacttca

SEQ ID NO: 21953 - DNA, 25 bp, Homo sapiens
ttagcggcgcttaaaatatgtcatg

SEQ ID NO: 21954 - DNA, 25 bp, Homo sapiens
ttcaatgtgtacttagcggcgctta

SEQ ID NO: 21955 - DNA, 25 bp, Homo sapiens
acatttaacaataatctgatacaca

SEQ ID NO: 21956 - DNA, 25 bp, Homo sapiens
atgtctgtgttaagtggttttttat

SEQ ID NO: 21957 - DNA, 25 bp, Homo sapiens
ccaggctccaactcacaaaatacga

SEQ ID NO: 21958 - DNA, 25 bp, Homo sapiens
gagacagtctgattcttgcaactta

SEQ ID NO: 21959 - DNA, 25 bp, Homo sapiens
gcaacagtacacacaaacatacata

SEQ ID NO: 21960 - DNA, 25 bp, Homo sapiens
ggaacttatttccaaacatgattga

SEQ ID NO: 21961 - DNA, 25 bp, Homo sapiens
gtgcatttgcatgtgcaacagtaca

SEQ ID NO: 21962 - DNA, 25 bp, Homo sapiens
taatgtatgcaatctactctcaaaa

SEQ ID NO: 21963 - DNA, 25 bp, Homo sapiens
tattgttgttttgttgccaggctcc

SEQ ID NO: 21964 - DNA, 25 bp, Homo sapiens
tgttgttttgttgccaggctccaac

SEQ ID NO: 21965 - DNA, 25 bp, Homo sapiens
ttcagcctagaaatgtctgtgttaa

SEQ ID NO: 21966 - DNA, 25 bp, Homo sapiens
atacgctttttactgcacaattttt

SEQ ID NO: 21967 - DNA, 25 bp, Homo sapiens
caactgaagcgattatttccagcag

SEQ ID NO: 21968 - DNA, 25 bp, Homo sapiens
gaagttttgtgatctatgtccggtg

SEQ ID NO: 21969 - DNA, 25 bp, Homo sapiens
gcttttctctttactggagtttcct

SEQ ID NO: 21970 - DNA, 25 bp, Homo sapiens
gtagagttgtatttcatatcacatt

SEQ ID NO: 21971 - DNA, 25 bp, Homo sapiens
gtttgttttcagattctgcaccctt

SEQ ID NO: 21972 - DNA, 25 bp, Homo sapiens
taatagttttacctttcgctagaat

SEQ ID NO: 21973 - DNA, 25 bp, Homo sapiens
tcctcttgtccatttctgatactga

SEQ ID NO: 21974 - DNA, 25 bp, Homo sapiens
tctatgtccggtgtgggtttttgtc

SEQ ID NO: 21975 - DNA, 25 bp, Homo sapiens
ttgtcctctcgagttttgtctctaa

SEQ ID NO: 21976 - DNA, 25 bp, Homo sapiens
tttccagcaggtttaatttcgacaa

SEQ ID NO: 21977 - DNA, 25 bp, Homo sapiens
aaaggtccagtccctgagatcttgt

SEQ ID NO: 21978 - DNA, 25 bp, Homo sapiens
agcaagcactgtacctactgtctgc

SEQ ID NO: 21979 - DNA, 25 bp, Homo sapiens
agcatggttctaatggccagggcat

SEQ ID NO: 21980 - DNA, 25 bp, Homo sapiens
ccagggcatgtcttcttattccatg

SEQ ID NO: 21981 - DNA, 25 bp, Homo sapiens
cttgcaaggtgatgtctgtcccgtg

SEQ ID NO: 21982 - DNA, 25 bp, Homo sapiens
ggagggacacaagagcgaggacagc

SEQ ID NO: 21983 - DNA, 25 bp, Homo sapiens
gggacagtggcacgagttgtcttgc

SEQ ID NO: 21984 - DNA, 25 bp, Homo sapiens
gtcgtcggtttcacattttcagaga

SEQ ID NO: 21985 - DNA, 25 bp, Homo sapiens
gtctgctgtctaagagggctggtct

SEQ ID NO: 21986 - DNA, 25 bp, Homo sapiens
gtggctggctgagttgctagtacgt

SEQ ID NO: 21987 - DNA, 25 bp, Homo sapiens
tgagatcttgtgtgcaaccgtcaga

SEQ ID NO: 21988 - DNA, 25 bp, Homo sapiens
aagtatcccctccttttatcaggag

SEQ ID NO: 21989 - DNA, 25 bp, Homo sapiens
agagggccagaagtatcccctcctt

SEQ ID NO: 21990 - DNA, 25 bp, Homo sapiens
agcagcatctgccaaaactaggtaa

SEQ ID NO: 21991 - DNA, 25 bp, Homo sapiens
gaaattagcctttacacttggcatt

SEQ ID NO: 21992 - DNA, 25 bp, Homo sapiens
gaggactactgctgttcaagtcatc

SEQ ID NO: 21993 - DNA, 25 bp, Homo sapiens
gagtgatgactgttattcttggttt

SEQ ID NO: 21994 - DNA, 25 bp, Homo sapiens
ggaagggtgagcattcagctataga

SEQ ID NO: 21995 - DNA, 25 bp, Homo sapiens
ggagccattaactttcccagaaact

SEQ ID NO: 21996 - DNA, 25 bp, Homo sapiens
taattgctgtagagtttcctgccca

SEQ ID NO: 21997 - DNA, 25 bp, Homo sapiens
taggcagaactcctatcacttggcc

SEQ ID NO: 21998 - DNA, 25 bp, Homo sapiens
tgttcaagtcatcacttccacattc

SEQ ID NO: 21999 - DNA, 25 bp, Homo sapiens
aataatgtcgccgttgtcacatcag

SEQ ID NO: 22000 - DNA, 25 bp, Homo sapiens
cagggagttcaccatacccttgaac

SEQ ID NO: 22001 - DNA, 25 bp, Homo sapiens
catcaaagcggatcttccagccatc

SEQ ID NO: 22002 - DNA, 25 bp, Homo sapiens
catccggccttgctgggagaataat

SEQ ID NO: 22003 - DNA, 25 bp, Homo sapiens
ccatcaaggaggggccacaaccacg

SEQ ID NO: 22004 - DNA, 25 bp, Homo sapiens
gcagacaaagcggtccaagggttcc

SEQ ID NO: 22005 - DNA, 25 bp, Homo sapiens
gtcacatcagctgacatgacctgga

SEQ ID NO: 22006 - DNA, 25 bp, Homo sapiens
tcatgccctaaactggcatccggcc

SEQ ID NO: 22007 - DNA, 25 bp, Homo sapiens
tggagaagcttggccaaggtgccca

SEQ ID NO: 22008 - DNA, 25 bp, Homo sapiens
tggaggagcgtcgccaacatcatgc

SEQ ID NO: 22009 - DNA, 25 bp, Homo sapiens
ttggccaaggggtcaaccatgctgc

SEQ ID NO: 22010 - DNA, 25 bp, Homo sapiens
aaacctgttgaatgttacgtattgg

SEQ ID NO: 22011 - DNA, 25 bp, Homo sapiens
aaccgctgtatttaagttagcatgt

SEQ ID NO: 22012 - DNA, 25 bp, Homo sapiens
ataccaatggttttgtgcccataat

SEQ ID NO: 22013 - DNA, 25 bp, Homo sapiens
atttccatttaatttatacacactc

SEQ ID NO: 22014 - DNA, 25 bp, Homo sapiens
gaaagattttagcatgcataccaat

SEQ ID NO: 22015 - DNA, 25 bp, Homo sapiens
gcaaaaattactttaaccgctgtat

SEQ ID NO: 22016 - DNA, 25 bp, Homo sapiens
gccatgtggacttgtttatgattat

SEQ ID NO: 22017 - DNA, 25 bp, Homo sapiens
ggcacaccatcacttttaactatat

SEQ ID NO: 22018 - DNA, 25 bp, Homo sapiens
gtagacattttggcacaccatcact

SEQ ID NO: 22019 - DNA, 25 bp, Homo sapiens
gtattggtatctttaatttcaacag

SEQ ID NO: 22020 - DNA, 25 bp, Homo sapiens
tacgcaatatataagcacacctaat

SEQ ID NO: 22021 - DNA, 25 bp, Homo sapiens
attagctgtagtcttctgtatttat

SEQ ID NO: 22022 - DNA, 25 bp, Homo sapiens
attcatattagctgtagtcttctgt

SEQ ID NO: 22023 - DNA, 25 bp, Homo sapiens
gaaattcgtgtatttattgtggctt

SEQ ID NO: 22024 - DNA, 25 bp, Homo sapiens
gaacttaacctggaccttatgttgt

SEQ ID NO: 22025 - DNA, 25 bp, Homo sapiens
gatgtcatgttgtatgtcacacagt

SEQ ID NO: 22026 - DNA, 25 bp, Homo sapiens
gattgatttctcttgtgtataagtt

SEQ ID NO: 22027 - DNA, 25 bp, Homo sapiens
gtcacacagtttctagattgatttc

SEQ ID NO: 22028 - DNA, 25 bp, Homo sapiens
gtggcacttgtattatgctgtactt

SEQ ID NO: 22029 - DNA, 25 bp, Homo sapiens
gttacttttactcaatatcaacagt

SEQ ID NO: 22030 - DNA, 25 bp, Homo sapiens
gttttatctttcaactgatttttat

SEQ ID NO: 22031 - DNA, 25 bp, Homo sapiens
taagcatttttaagtcttatcctta

SEQ ID NO: 22032 - DNA, 25 bp, Homo sapiens
agcagctcctgagtgccatgaacaa

SEQ ID NO: 22033 - DNA, 25 bp, Homo sapiens
atgaacaagcagcggggctccaagg

SEQ ID NO: 22034 - DNA, 25 bp, Homo sapiens
cagaatggggtcgggagtctcggac

SEQ ID NO: 22035 - DNA, 25 bp, Homo sapiens
gacccccaggctattggtggatgac

SEQ ID NO: 22036 - DNA, 25 bp, Homo sapiens
gacctccctgggctataagatggat

SEQ ID NO: 22037 - DNA, 25 bp, Homo sapiens
gccaaaagacgggcccagaatgggg

SEQ ID NO: 22038 - DNA, 25 bp, Homo sapiens
ggccagcacctagcagcggatgctg

SEQ ID NO: 22039 - DNA, 25 bp, Homo sapiens
tattggtggatgactgactgacagg

SEQ ID NO: 22040 - DNA, 25 bp, Homo sapiens
tcaaccgacatggggttctgctcat

SEQ ID NO: 22041 - DNA, 25 bp, Homo sapiens
tcatcgccatcaaccgacatggggt

SEQ ID NO: 22042 - DNA, 25 bp, Homo sapiens
tgacctcatatgtgcagcagctcct

SEQ ID NO: 22043 - DNA, 25 bp, Homo sapiens
acaaaggctactgctgaatagaagt

SEQ ID NO: 22044 - DNA, 25 bp, Homo sapiens
agttcatccatgatctcacttaacc

SEQ ID NO: 22045 - DNA, 25 bp, Homo sapiens
cctcatctgtatcaccagatgggcc

SEQ ID NO: 22046 - DNA, 25 bp, Homo sapiens
cttcttctcaaacacatgcaggatg

SEQ ID NO: 22047 - DNA, 25 bp, Homo sapiens
gagttgagggaattatctggccacc

SEQ ID NO: 22048 - DNA, 25 bp, Homo sapiens
ggaccacaaaggctactgctgaata

SEQ ID NO: 22049 - DNA, 25 bp, Homo sapiens
ggccttcttctcaaacacatgcagg

SEQ ID NO: 22050 - DNA, 25 bp, Homo sapiens
tcatccatgatctcacttaaccacc

SEQ ID NO: 22051 - DNA, 25 bp, Homo sapiens
tcatctgtatcaccagatgggcctt

SEQ ID NO: 22052 - DNA, 25 bp, Homo sapiens
tgcaggatgtgagagtcctcctcgg

SEQ ID NO: 22053 - DNA, 25 bp, Homo sapiens
tgggaccacaaaggctactgctgaa

SEQ ID NO: 22054 - DNA, 25 bp, Homo sapiens
actagtgttgaagcctgttccagag

SEQ ID NO: 22055 - DNA, 25 bp, Homo sapiens
agtagcaccagctggtcatggcttt

SEQ ID NO: 22056 - DNA, 25 bp, Homo sapiens
caaggagaggatggtcagccctacc

SEQ ID NO: 22057 - DNA, 25 bp, Homo sapiens
catccctattcagtagcaccagctg

SEQ ID NO: 22058 - DNA, 25 bp, Homo sapiens
ccctattcagtagcaccagctggtc

SEQ ID NO: 22059 - DNA, 25 bp, Homo sapiens
cctgtttgacaatgtttgctgttga

SEQ ID NO: 22060 - DNA, 25 bp, Homo sapiens
gaacaggggttttgatgccctcact

SEQ ID NO: 22061 - DNA, 25 bp, Homo sapiens
gagaggtgggactgcaaggagagga

SEQ ID NO: 22062 - DNA, 25 bp, Homo sapiens
gatgccctcactagtgttgaagcct

SEQ ID NO: 22063 - DNA, 25 bp, Homo sapiens
ggggcctacagatgaagctggctct

SEQ ID NO: 22064 - DNA, 25 bp, Homo sapiens
gttccagagagaggtgggactgcaa

SEQ ID NO: 22065 - DNA, 25 bp, Homo sapiens
aaactggacatttcaagacccaaat

SEQ ID NO: 22066 - DNA, 25 bp, Homo sapiens
aaagtcactgtatcaattgccatga

SEQ ID NO: 22067 - DNA, 25 bp, Homo sapiens
attttttatcccatgcataggtgct

SEQ ID NO: 22068 - DNA, 25 bp, Homo sapiens
cctgagataaagaatcctgcaccca

SEQ ID NO: 22069 - DNA, 25 bp, Homo sapiens
cttgagggacctgaatctaccgatt

SEQ ID NO: 22070 - DNA, 25 bp, Homo sapiens
gcataggtgctacacttggatcaaa

SEQ ID NO: 22071 - DNA, 25 bp, Homo sapiens
ggacatagtccccagaagacagtac

SEQ ID NO: 22072 - DNA, 25 bp, Homo sapiens
taaggcagcaggaccagtttgagtg

SEQ ID NO: 22073 - DNA, 25 bp, Homo sapiens
tccttggatttagtgaacccctttg

SEQ ID NO: 22074 - DNA, 25 bp, Homo sapiens
tctaccgattcatcttaaggcagca

SEQ ID NO: 22075 - DNA, 25 bp, Homo sapiens
tgataaaagggaccgtcttccttgg

SEQ ID NO: 22076 - DNA, 25 bp, Homo sapiens
aagacacaggcatagctgcagagga

SEQ ID NO: 22077 - DNA, 25 bp, Homo sapiens
acagagcaggtcaggggcgctggat

SEQ ID NO: 22078 - DNA, 25 bp, Homo sapiens
acagggtcggaactctccagaaaag

SEQ ID NO: 22079 - DNA, 25 bp, Homo sapiens
actgagggggcttaacctgtcctct

SEQ ID NO: 22080 - DNA, 25 bp, Homo sapiens
cataaaagcagcgtccttcctatct

SEQ ID NO: 22081 - DNA, 25 bp, Homo sapiens
catgctgactgaggccaagtggggc

SEQ ID NO: 22082 - DNA, 25 bp, Homo sapiens
cctcagagccaagccatgctgactg

SEQ ID NO: 22083 - DNA, 25 bp, Homo sapiens
gagggaagtgccgtgcaggatgcag

SEQ ID NO: 22084 - DNA, 25 bp, Homo sapiens
gccaggctgatgtggtgaacagctc

SEQ ID NO: 22085 - DNA, 25 bp, Homo sapiens
gcctgccacggagggactttggtgg

SEQ ID NO: 22086 - DNA, 25 bp, Homo sapiens
ggctaggctggagtggactacaagg

SEQ ID NO: 22087 - DNA, 25 bp, Homo sapiens
aaatctggtcttatagctagacatg

SEQ ID NO: 22088 - DNA, 25 bp, Homo sapiens
accgtttatccagctgttaacattt

SEQ ID NO: 22089 - DNA, 25 bp, Homo sapiens
acttccctacgttcagttgttagat

SEQ ID NO: 22090 - DNA, 25 bp, Homo sapiens
agctgaaagagccaggtatttacct

SEQ ID NO: 22091 - DNA, 25 bp, Homo sapiens
gcagaggggaccactgattggcaga

SEQ ID NO: 22092 - DNA, 25 bp, Homo sapiens
gcatattttaccgtttatccagctg

SEQ ID NO: 22093 - DNA, 25 bp, Homo sapiens
gctagacatgatgatggtccccaaa

SEQ ID NO: 22094 - DNA, 25 bp, Homo sapiens
ggtccccaaaccattgatgttctgt

SEQ ID NO: 22095 - DNA, 25 bp, Homo sapiens
gtatcactgtgtggaaaatacctcc

SEQ ID NO: 22096 - DNA, 25 bp, Homo sapiens
tgtactgtaatgggaagcgattctg

SEQ ID NO: 22097 - DNA, 25 bp, Homo sapiens
ttggcagaaaacttccctacgttca

SEQ ID NO: 22098 - DNA, 25 bp, Homo sapiens
aagagtaatacaacccatctatctt

SEQ ID NO: 22099 - DNA, 25 bp, Homo sapiens
aagctgtagcatattcactaaacaa

SEQ ID NO: 22100 - DNA, 25 bp, Homo sapiens
aatggtcactttacaatttcagtat

SEQ ID NO: 22101 - DNA, 25 bp, Homo sapiens
atttcagtatgtctgtaccttgtat

SEQ ID NO: 22102 - DNA, 25 bp, Homo sapiens
cagtattttccctgagctagaggag

SEQ ID NO: 22103 - DNA, 25 bp, Homo sapiens
catctatcttattagtcttgtgcca

SEQ ID NO: 22104 - DNA, 25 bp, Homo sapiens
ctgtaccttgtatcttagcttgagt

SEQ ID NO: 22105 - DNA, 25 bp, Homo sapiens
gaatatctcacacatttgtaatgga

SEQ ID NO: 22106 - DNA, 25 bp, Homo sapiens
gatagggacctttaaatatgtgttt

SEQ ID NO: 22107 - DNA, 25 bp, Homo sapiens
gtatgtgacccccagatcactaagc

SEQ ID NO: 22108 - DNA, 25 bp, Homo sapiens
ttagcttgagtatgattgtcttatc

SEQ ID NO: 22109 - DNA, 25 bp, Homo sapiens
aatatattggtgtcctctgctcaga

SEQ ID NO: 22110 - DNA, 25 bp, Homo sapiens
actgtgaaattaactggcatcctgg

SEQ ID NO: 22111 - DNA, 25 bp, Homo sapiens
atgatggtttcagagggaagccctt

SEQ ID NO: 22112 - DNA, 25 bp, Homo sapiens
cctagggagaggtcggggtcaccag

SEQ ID NO: 22113 - DNA, 25 bp, Homo sapiens
ctcagaggggactgtcatcatggtg

SEQ ID NO: 22114 - DNA, 25 bp, Homo sapiens
cttttcctccctgagactgtgtggg

SEQ ID NO: 22115 - DNA, 25 bp, Homo sapiens
gactgggggccaatgactcaccccc

SEQ ID NO: 22116 - DNA, 25 bp, Homo sapiens
ggcctcatctgtacactgtgaaatt

SEQ ID NO: 22117 - DNA, 25 bp, Homo sapiens
ggctacatggcgacatctaggcagc

SEQ ID NO: 22118 - DNA, 25 bp, Homo sapiens
gtcagcctgctgaaattgcttccac

SEQ ID NO: 22119 - DNA, 25 bp, Homo sapiens
tctccgaatgtgtatctttgggccc

SEQ ID NO: 22120 - DNA, 25 bp, Homo sapiens
acatttatctctgcactcacatttt

SEQ ID NO: 22121 - DNA, 25 bp, Homo sapiens
atgagtgtgccgagttatgccaccc

SEQ ID NO: 22122 - DNA, 25 bp, Homo sapiens
ccctgtcactatctgtggctgggtg

SEQ ID NO: 22123 - DNA, 25 bp, Homo sapiens
gcatgtcacggtgggtggctgtgtc

SEQ ID NO: 22124 - DNA, 25 bp, Homo sapiens
gctgggtgaacggctgtgtcattat

SEQ ID NO: 22125 - DNA, 25 bp, Homo sapiens
gttggtgacatgcattgcacgggcc

SEQ ID NO: 22126 - DNA, 25 bp, Homo sapiens
tatactgcggcgtgttttctgtcta

SEQ ID NO: 22127 - DNA, 25 bp, Homo sapiens
tctgagcacctccagcagatgtcac

SEQ ID NO: 22128 - DNA, 25 bp, Homo sapiens
tgctcagggcacatgcacacagaca

SEQ ID NO: 22129 - DNA, 25 bp, Homo sapiens
ttatctccgtacatgtgggtgtcgc

SEQ ID NO: 22130 - DNA, 25 bp, Homo sapiens
ttttctgtctacccatgtcatggtg

SEQ ID NO: 22131 - DNA, 25 bp, Homo sapiens
aaaatcttaatcattatccttctaa

SEQ ID NO: 22132 - DNA, 25 bp, Homo sapiens
aaatatatattactactcctttgga

SEQ ID NO: 22133 - DNA, 25 bp, Homo sapiens
aaatctggggttctcaggttcactc

SEQ ID NO: 22134 - DNA, 25 bp, Homo sapiens
aagcctgagcagggcgaggaccaat

SEQ ID NO: 22135 - DNA, 25 bp, Homo sapiens
gaaagtttagatctgtcccttaata

SEQ ID NO: 22136 - DNA, 25 bp, Homo sapiens
gctggcttgtacatagtaggcacta

SEQ ID NO: 22137 - DNA, 25 bp, Homo sapiens
ggttgattgtttaagccagagtgta

SEQ ID NO: 22138 - DNA, 25 bp, Homo sapiens
gtattgctttagtatgctggcttgt

SEQ ID NO: 22139 - DNA, 25 bp, Homo sapiens
gttaagatatccctaatgttttgct

SEQ ID NO: 22140 - DNA, 25 bp, Homo sapiens
tagtgctcttaacttgttaccattg

SEQ ID NO: 22141 - DNA, 25 bp, Homo sapiens
tttgcttcaacaactttgtgctttc

SEQ ID NO: 22142 - DNA, 25 bp, Homo sapiens
accagcagcaccaatagtgcctgac

SEQ ID NO: 22143 - DNA, 25 bp, Homo sapiens
acttctattttccattacatcactt

SEQ ID NO: 22144 - DNA, 25 bp, Homo sapiens
attacatcacttcattcaggttggt

SEQ ID NO: 22145 - DNA, 25 bp, Homo sapiens
cagctccctggtattattgttgtct

SEQ ID NO: 22146 - DNA, 25 bp, Homo sapiens
ctgagtgatctcaacagcctcacgg

SEQ ID NO: 22147 - DNA, 25 bp, Homo sapiens
gttggtgatcagctgcaacttcctc

SEQ ID NO: 22148 - DNA, 25 bp, Homo sapiens
tcaacagcctcacggcacattgaaa

SEQ ID NO: 22149 - DNA, 25 bp, Homo sapiens
tcagaaagaccactgctgcttccag

SEQ ID NO: 22150 - DNA, 25 bp, Homo sapiens
tctctcctcctcagttactaaagca

SEQ ID NO: 22151 - DNA, 25 bp, Homo sapiens
ttattgttgtctttatcgcttatta

SEQ ID NO: 22152 - DNA, 25 bp, Homo sapiens
ttgtattagattactcagctccctg

SEQ ID NO: 22153 - DNA, 25 bp, Homo sapiens
accacaaactttcaccattcttcag

SEQ ID NO: 22154 - DNA, 25 bp, Homo sapiens
caaactttcaccattcttcaggttt

SEQ ID NO: 22155 - DNA, 25 bp, Homo sapiens
cagtgccttagagaccacacactcc

SEQ ID NO: 22156 - DNA, 25 bp, Homo sapiens
catagtcgtagaatcctttttttga

SEQ ID NO: 22157 - DNA, 25 bp, Homo sapiens
cattgcatctcacatatccactgat

SEQ ID NO: 22158 - DNA, 25 bp, Homo sapiens
ccacactgtaccacaaactttcacc

SEQ ID NO: 22159 - DNA, 25 bp, Homo sapiens
ccccagtcttgaccattctactaat

SEQ ID NO: 22160 - DNA, 25 bp, Homo sapiens
ctgaaattcagtgccttagagacca

SEQ ID NO: 22161 - DNA, 25 bp, Homo sapiens
gcccaaagccacacttactgttttc

SEQ ID NO: 22162 - DNA, 25 bp, Homo sapiens
tcatatcctcgctcattaccaggga

SEQ ID NO: 22163 - DNA, 25 bp, Homo sapiens
tggaattccaggctgtactcactgc

SEQ ID NO: 22164 - DNA, 25 bp, Homo sapiens
accccaaatgcataatctcgttaat

SEQ ID NO: 22165 - DNA, 25 bp, Homo sapiens
cgattttttgaatccatcatcaagg

SEQ ID NO: 22166 - DNA, 25 bp, Homo sapiens
gagacgagactttgttaagcacctt

SEQ ID NO: 22167 - DNA, 25 bp, Homo sapiens
gagtgcaaggacctactgcagtcag

SEQ ID NO: 22168 - DNA, 25 bp, Homo sapiens
gccttccagaggctaagaaatttct

SEQ ID NO: 22169 - DNA, 25 bp, Homo sapiens
ggatattgctgaagtctcctggcat

SEQ ID NO: 22170 - DNA, 25 bp, Homo sapiens
gtctcctggcatatgttaccgaatc

SEQ ID NO: 22171 - DNA, 25 bp, Homo sapiens
tattcccacctgtgctggtagatat

SEQ ID NO: 22172 - DNA, 25 bp, Homo sapiens
tccctggaggattatcacaccccaa

SEQ ID NO: 22173 - DNA, 25 bp, Homo sapiens
ttctctggagatgacctagaatgca

SEQ ID NO: 22174 - DNA, 25 bp, Homo sapiens
tttgagaatacttgtccctggagga

SEQ ID NO: 22175 - DNA, 25 bp, Homo sapiens
agcagtgccttatatagttgccata

SEQ ID NO: 22176 - DNA, 25 bp, Homo sapiens
gaagtactatattttttgtgcatca

SEQ ID NO: 22177 - DNA, 25 bp, Homo sapiens
gaatgtttgcatgtttcagttttca

SEQ ID NO: 22178 - DNA, 25 bp, Homo sapiens
gcagggtcataatcacacagcagtg

SEQ ID NO: 22179 - DNA, 25 bp, Homo sapiens
gctacatatcagggcatattctata

SEQ ID NO: 22180 - DNA, 25 bp, Homo sapiens
gttgccataagacttcagtgcagta

SEQ ID NO: 22181 - DNA, 25 bp, Homo sapiens
tattctatatggtgtatttgtgtta

SEQ ID NO: 22182 - DNA, 25 bp, Homo sapiens
tatttttctatttacaagcctatgt

SEQ ID NO: 22183 - DNA, 25 bp, Homo sapiens
acattttctcccataagacatgcac

SEQ ID NO: 22184 - DNA, 25 bp, Homo sapiens
agcaagggcaagtagagctgcagct

SEQ ID NO: 22185 - DNA, 25 bp, Homo sapiens
agttattatcactctttaaggccaa

SEQ ID NO: 22186 - DNA, 25 bp, Homo sapiens
ctcctctgagtgagttcatcctgga

SEQ ID NO: 22187 - DNA, 25 bp, Homo sapiens
gaaacctaatcctaggtgctgccac

SEQ ID NO: 22188 - DNA, 25 bp, Homo sapiens
gacaaacaagaagcaccagacacag

SEQ ID NO: 22189 - DNA, 25 bp, Homo sapiens
gacacagtgctgttttagggtgggg

SEQ ID NO: 22190 - DNA, 25 bp, Homo sapiens
gacatgcacaggtcttacgtttaca

SEQ ID NO: 22191 - DNA, 25 bp, Homo sapiens
gggtggggcagaattatgctgaggg

SEQ ID NO: 22192 - DNA, 25 bp, Homo sapiens
ggtgctgccactgggacaaacaaga

SEQ ID NO: 22193 - DNA, 25 bp, Homo sapiens
gtagaccttgtacaatagagcttat

SEQ ID NO: 22194 - DNA, 25 bp, Homo sapiens
agaacccagtgatggagccttaagt

SEQ ID NO: 22195 - DNA, 25 bp, Homo sapiens
atataactgatgttttattccttgt

SEQ ID NO: 22196 - DNA, 25 bp, Homo sapiens
atgtatgttttactattggcattag

SEQ ID NO: 22197 - DNA, 25 bp, Homo sapiens
attggcattagtaattattttccct

SEQ ID NO: 22198 - DNA, 25 bp, Homo sapiens
gaggatactgtagacagaacccagt

SEQ ID NO: 22199 - DNA, 25 bp, Homo sapiens
ggtgtgtggttggtagaatcactat

SEQ ID NO: 22200 - DNA, 25 bp, Homo sapiens
gtgacttaaaccttagacatcaatc

SEQ ID NO: 22201 - DNA, 25 bp, Homo sapiens
tattccttgtgactacactatttag

SEQ ID NO: 22202 - DNA, 25 bp, Homo sapiens
tcctcctacccaatagtaccatgaa

SEQ ID NO: 22203 - DNA, 25 bp, Homo sapiens
ttccctttatgcaatttcttttaga

SEQ ID NO: 22204 - DNA, 25 bp, Homo sapiens
tttcttttagagtgcttctgtcttc

SEQ ID NO: 22205 - DNA, 25 bp, Homo sapiens
cagcagtggatttctcaagtttgga

SEQ ID NO: 22206 - DNA, 25 bp, Homo sapiens
cagctaggctttgacggcaggcctc

SEQ ID NO: 22207 - DNA, 25 bp, Homo sapiens
cctccacaaggtctacccttttgat

SEQ ID NO: 22208 - DNA, 25 bp, Homo sapiens
gaaaaggggtgtcttcctgtgcaac

SEQ ID NO: 22209 - DNA, 25 bp, Homo sapiens
gattccctttaactgaattctgttc

SEQ ID NO: 22210 - DNA, 25 bp, Homo sapiens
gtgcaactgacacagctaggctttg

SEQ ID NO: 22211 - DNA, 25 bp, Homo sapiens
gtttttgtttcatgggcggtgggag

SEQ ID NO: 22212 - DNA, 25 bp, Homo sapiens
tccctcatcttcataactcagcagt

SEQ ID NO: 22213 - DNA, 25 bp, Homo sapiens
tctaccatagggatcatttcatgca

SEQ ID NO: 22214 - DNA, 25 bp, Homo sapiens
tgttccattatgttgattgcttgta

SEQ ID NO: 22215 - DNA, 25 bp, Homo sapiens
tttagtctttgctgttatctgtccc

SEQ ID NO: 22216 - DNA, 25 bp, Homo sapiens
aaatgctactgagattctgctgtaa

SEQ ID NO: 22217 - DNA, 25 bp, Homo sapiens
aagtatgtcatttatgctcaaagtt

SEQ ID NO: 22218 - DNA, 25 bp, Homo sapiens
attgatgtacattgatagatgccat

SEQ ID NO: 22219 - DNA, 25 bp, Homo sapiens
cagtgctgctgtgaactaaagtatg

SEQ ID NO: 22220 - DNA, 25 bp, Homo sapiens
gagattctgctgtaaatatgactag

SEQ ID NO: 22221 - DNA, 25 bp, Homo sapiens
gatagatgccataaatcagtagcaa

SEQ ID NO: 22222 - DNA, 25 bp, Homo sapiens
gtaattattcttgggtgcctttcaa

SEQ ID NO: 22223 - DNA, 25 bp, Homo sapiens
gtagcaaaaggcacttctaaaggta

SEQ ID NO: 22224 - DNA, 25 bp, Homo sapiens
gtagctttattttacaagaaggcat

SEQ ID NO: 22225 - DNA, 25 bp, Homo sapiens
gtggcaagtaattcacagttgtaaa

SEQ ID NO: 22226 - DNA, 25 bp, Homo sapiens
tctttgtaaatctgaatgaccataa

SEQ ID NO: 22227 - DNA, 25 bp, Homo sapiens
aactatgatcacatcgtgctctctc

SEQ ID NO: 22228 - DNA, 25 bp, Homo sapiens
aaggtcacacagttcttggaatcag

SEQ ID NO: 22229 - DNA, 25 bp, Homo sapiens
cagttatttcttcatgattctgcct

SEQ ID NO: 22230 - DNA, 25 bp, Homo sapiens
catgattctgcctggctttctgagt

SEQ ID NO: 22231 - DNA, 25 bp, Homo sapiens
ctcttcctcactctttaaatgtcat

SEQ ID NO: 22232 - DNA, 25 bp, Homo sapiens
gagcacttagaaacatcacgcatca

SEQ ID NO: 22233 - DNA, 25 bp, Homo sapiens
gatgacgcagacgagagcaacatac

SEQ ID NO: 22234 - DNA, 25 bp, Homo sapiens
gttatcaatgccatttccatttgga

SEQ ID NO: 22235 - DNA, 25 bp, Homo sapiens
tacttggaacctgttgctttctctt

SEQ ID NO: 22236 - DNA, 25 bp, Homo sapiens
tcacgcatcaggaaccgggtcaggg

SEQ ID NO: 22237 - DNA, 25 bp, Homo sapiens
tctccacgagccttcctgaagtaaa

SEQ ID NO: 22238 - DNA, 25 bp, Homo sapiens
aagacgtgtggtttgagttgcgggc

SEQ ID NO: 22239 - DNA, 25 bp, Homo sapiens
actcaagctgtctttagttcccaaa

SEQ ID NO: 22240 - DNA, 25 bp, Homo sapiens
gaaggacaccttactcaagctgtct

SEQ ID NO: 22241 - DNA, 25 bp, Homo sapiens
gacagcaggagtacccctaagttct

SEQ ID NO: 22242 - DNA, 25 bp, Homo sapiens
gacaggaagtgtagggaccccatgc

SEQ ID NO: 22243 - DNA, 25 bp, Homo sapiens
gatgggcatgaccgagacagcagga

SEQ ID NO: 22244 - DNA, 25 bp, Homo sapiens
ggaccttgggcctgataagtgggcg

SEQ ID NO: 22245 - DNA, 25 bp, Homo sapiens
gggaccccatgcttgatggatggtg

SEQ ID NO: 22246 - DNA, 25 bp, Homo sapiens
gggcgactgcagtagtgcgggaacc

SEQ ID NO: 22247 - DNA, 25 bp, Homo sapiens
gtccggcatcctaagacgtgtggtt

SEQ ID NO: 22248 - DNA, 25 bp, Homo sapiens
tatagtgtggtagtctcagtgttga

SEQ ID NO: 22249 - DNA, 25 bp, Homo sapiens
acactgtgtattaggtttatcatcc

SEQ ID NO: 22250 - DNA, 25 bp, Homo sapiens
agtttcttaatcgcactacctatgc

SEQ ID NO: 22251 - DNA, 25 bp, Homo sapiens
atagtagtttttaacatgcctgtag

SEQ ID NO: 22252 - DNA, 25 bp, Homo sapiens
atgcctgtagtattgctaactgcaa

SEQ ID NO: 22253 - DNA, 25 bp, Homo sapiens
caaagtaataggcttcttgtccctt

SEQ ID NO: 22254 - DNA, 25 bp, Homo sapiens
cccttttttttctggcatgttatgg

SEQ ID NO: 22255 - DNA, 25 bp, Homo sapiens
cgcactacctatgcaacactgtgta

SEQ ID NO: 22256 - DNA, 25 bp, Homo sapiens
gaagttcaactcaggaaggtgcaat

SEQ ID NO: 22257 - DNA, 25 bp, Homo sapiens
gtactaccgttccagattttctgta

SEQ ID NO: 22258 - DNA, 25 bp, Homo sapiens
gtgacctgtatgtatattctaatct

SEQ ID NO: 22259 - DNA, 25 bp, Homo sapiens
ttatcaagcagtacaccaactcata

SEQ ID NO: 22260 - DNA, 25 bp, Homo sapiens
aaagaatgtgttttgcccagttatt

SEQ ID NO: 22261 - DNA, 25 bp, Homo sapiens
agtattcagtcttgtgttctttttc

SEQ ID NO: 22262 - DNA, 25 bp, Homo sapiens
agtgtacaggtttgtaactgccaaa

SEQ ID NO: 22263 - DNA, 25 bp, Homo sapiens
atattgctggtggcagtattcagtc

SEQ ID NO: 22264 - DNA, 25 bp, Homo sapiens
cacttagagtggattttgtccctta

SEQ ID NO: 22265 - DNA, 25 bp, Homo sapiens
gcaaaggggaaagctaacacttaga

SEQ ID NO: 22266 - DNA, 25 bp, Homo sapiens
ggattgttcctgcatatattgctgg

SEQ ID NO: 22267 - DNA, 25 bp, Homo sapiens
gtggattttgtcccttaaggaaatg

SEQ ID NO: 22268 - DNA, 25 bp, Homo sapiens
gtgttttgcccagttattaagtatt

SEQ ID NO: 22269 - DNA, 25 bp, Homo sapiens
tgcacattcacctcaacttgcacac

SEQ ID NO: 22270 - DNA, 25 bp, Homo sapiens
ttcatatacatgcacattcacctca

SEQ ID NO: 22271 - DNA, 25 bp, Homo sapiens
atattgcattttctggggccaaaaa

SEQ ID NO: 22272 - DNA, 25 bp, Homo sapiens
atttcttctcacattaagacctcca

SEQ ID NO: 22273 - DNA, 25 bp, Homo sapiens
cagccatgtggctccaaatgactaa

SEQ ID NO: 22274 - DNA, 25 bp, Homo sapiens
gaaccgcctggaagctttaagcaca

SEQ ID NO: 22275 - DNA, 25 bp, Homo sapiens
gattggtgacccctgaggagttcat

SEQ ID NO: 22276 - DNA, 25 bp, Homo sapiens
gatttcacactcatcctaatgtttt

SEQ ID NO: 22277 - DNA, 25 bp, Homo sapiens
ggataactttgattcaccctatgac

SEQ ID NO: 22278 - DNA, 25 bp, Homo sapiens
taagacctccaatgtccagagccag

SEQ ID NO: 22279 - DNA, 25 bp, Homo sapiens
tcatcatgatgagaaccgcctggaa

SEQ ID NO: 22280 - DNA, 25 bp, Homo sapiens
tgaactactatgcaggtgtgagcgc

SEQ ID NO: 22281 - DNA, 25 bp, Homo sapiens
tgtgagcgcatccattgacactgat

SEQ ID NO: 22282 - DNA, 25 bp, Homo sapiens
aggagagatgtcttaccagcagcag

SEQ ID NO: 22283 - DNA, 25 bp, Homo sapiens
atcttcccttcagctgtagtgggag

SEQ ID NO: 22284 - DNA, 25 bp, Homo sapiens
cacctccaccatgccaggataaatg

SEQ ID NO: 22285 - DNA, 25 bp, Homo sapiens
cagatcattgcctaatctcgctttg

SEQ ID NO: 22286 - DNA, 25 bp, Homo sapiens
caggataaatgccctcctgtgcaac

SEQ ID NO: 22287 - DNA, 25 bp, Homo sapiens
gatgagcagccagatcattgcctaa

SEQ ID NO: 22288 - DNA, 25 bp, Homo sapiens
gatgtagatggtggttcctatcctg

SEQ ID NO: 22289 - DNA, 25 bp, Homo sapiens
ggttcctatcctgagagcaagtgtg

SEQ ID NO: 22290 - DNA, 25 bp, Homo sapiens
gtagtgggaggctgcatcttcccta

SEQ ID NO: 22291 - DNA, 25 bp, Homo sapiens
taacctctgtctggcttgagcgttg

SEQ ID NO: 22292 - DNA, 25 bp, Homo sapiens
ttcttttgcttctccccaataaagc

SEQ ID NO: 22293 - DNA, 25 bp, Homo sapiens
aacatcaatggctttgtacttgtga

SEQ ID NO: 22294 - DNA, 25 bp, Homo sapiens
aagtcacacggcttgtgggcactgt

SEQ ID NO: 22295 - DNA, 25 bp, Homo sapiens
aatgtgctctgtacctgtcaaaaat

SEQ ID NO: 22296 - DNA, 25 bp, Homo sapiens
gaccatgttatattgcttcctgtgt

SEQ ID NO: 22297 - DNA, 25 bp, Homo sapiens
gagataaccttgccctagttgtggg

SEQ ID NO: 22298 - DNA, 25 bp, Homo sapiens
gggcactgtgccaagatttaaaatt

SEQ ID NO: 22299 - DNA, 25 bp, Homo sapiens
gtacaccacatgctattgtctgaac

SEQ ID NO: 22300 - DNA, 25 bp, Homo sapiens
tctccttgatcatgtcttcattttt

SEQ ID NO: 22301 - DNA, 25 bp, Homo sapiens
tgtaacatctgccatttatttcctc

SEQ ID NO: 22302 - DNA, 25 bp, Homo sapiens
tgttttctctctgttacacactaac

SEQ ID NO: 22303 - DNA, 25 bp, Homo sapiens
tttcctcagctgtacaaatcctctg

SEQ ID NO: 22304 - DNA, 25 bp, Homo sapiens
aagggagacgtttccatcatttctt

SEQ ID NO: 22305 - DNA, 25 bp, Homo sapiens
acacacatgccctgttgtctggggt

SEQ ID NO: 22306 - DNA, 25 bp, Homo sapiens
agtgttagggtcacagtcccggact

SEQ ID NO: 22307 - DNA, 25 bp, Homo sapiens
caaaagcagcctacaagcgggtcag

SEQ ID NO: 22308 - DNA, 25 bp, Homo sapiens
gaggcaaacctgcatcagtggggag

SEQ ID NO: 22309 - DNA, 25 bp, Homo sapiens
ggcagactgtttctctattggtatg

SEQ ID NO: 22310 - DNA, 25 bp, Homo sapiens
ggctttttgccatgcctatcaaagg

SEQ ID NO: 22311 - DNA, 25 bp, Homo sapiens
gggtcaggaaggcagtctcacaaag

SEQ ID NO: 22312 - DNA, 25 bp, Homo sapiens
tgggaagactcaccacatactcatc

SEQ ID NO: 22313 - DNA, 25 bp, Homo sapiens
tgtactcagcactgtgttccacatt

SEQ ID NO: 22314 - DNA, 25 bp, Homo sapiens
ttaggaagtgccatctgtactcagc

SEQ ID NO: 22315 - DNA, 25 bp, Homo sapiens
aatagtccaatatagcattccccaa

SEQ ID NO: 22316 - DNA, 25 bp, Homo sapiens
acccaacaagccactcgatgcattt

SEQ ID NO: 22317 - DNA, 25 bp, Homo sapiens
acgtgccttgcttgattttatatat

SEQ ID NO: 22318 - DNA, 25 bp, Homo sapiens
gagagtcgtaggacccttacaagac

SEQ ID NO: 22319 - DNA, 25 bp, Homo sapiens
gcattccccaaatgaacagcagcca

SEQ ID NO: 22320 - DNA, 25 bp, Homo sapiens
gccactcgatgcatttttctatcac

SEQ ID NO: 22321 - DNA, 25 bp, Homo sapiens
taaagcctgactgtcacgtgccttg

SEQ ID NO: 22322 - DNA, 25 bp, Homo sapiens
tatcacattctcaatagttccagct

SEQ ID NO: 22323 - DNA, 25 bp, Homo sapiens
tcagaggctccagcatctctagtac

SEQ ID NO: 22324 - DNA, 25 bp, Homo sapiens
tcctactagatacactgcaaactac

SEQ ID NO: 22325 - DNA, 25 bp, Homo sapiens
tttatctggacatcccaccatcaaa

SEQ ID NO: 22326 - DNA, 25 bp, Homo sapiens
aaaatgtcctgtcggtacaacgctt

SEQ ID NO: 22327 - DNA, 25 bp, Homo sapiens
cgagagtgaattaactcccctcctc

SEQ ID NO: 22328 - DNA, 25 bp, Homo sapiens
gagtctccgttggacacaacttaat

SEQ ID NO: 22329 - DNA, 25 bp, Homo sapiens
gagttcatgagtctccgttggacac

SEQ ID NO: 22330 - DNA, 25 bp, Homo sapiens
gatggctaagtttcgtttctctttt

SEQ ID NO: 22331 - DNA, 25 bp, Homo sapiens
gcttcccctgcgagagtgaattaac

SEQ ID NO: 22332 - DNA, 25 bp, Homo sapiens
gtgaagttgcatttaagagctcctt

SEQ ID NO: 22333 - DNA, 25 bp, Homo sapiens
tagcggctaccctaaaatgtcctgt

SEQ ID NO: 22334 - DNA, 25 bp, Homo sapiens
tccagagctaccctgatggctaagt

SEQ ID NO: 22335 - DNA, 25 bp, Homo sapiens
tcttaggaacgacatttttgaatca

SEQ ID NO: 22336 - DNA, 25 bp, Homo sapiens
tgattttgtgatcccaagcaactat

SEQ ID NO: 22337 - DNA, 25 bp, Homo sapiens
actaattgtgttattccttgttgat

SEQ ID NO: 22338 - DNA, 25 bp, Homo sapiens
atacacctaccagatttcaagctat

SEQ ID NO: 22339 - DNA, 25 bp, Homo sapiens
atagctattgtggctttggtcgctt

SEQ ID NO: 22340 - DNA, 25 bp, Homo sapiens
gctttggtcgcttaggattctcata

SEQ ID NO: 22341 - DNA, 25 bp, Homo sapiens
ggattctcatatatttacacatggc

SEQ ID NO: 22342 - DNA, 25 bp, Homo sapiens
gtatattttaatgctgacctttgcc

SEQ ID NO: 22343 - DNA, 25 bp, Homo sapiens
gtcaggttgatttgccttcatttaa

SEQ ID NO: 22344 - DNA, 25 bp, Homo sapiens
tgacctttgcctgtgaactagaaaa

SEQ ID NO: 22345 - DNA, 25 bp, Homo sapiens
ttcttttcatatacacctaccagat

SEQ ID NO: 22346 - DNA, 25 bp, Homo sapiens
ttggatatttcccttgtacaacctt

SEQ ID NO: 22347 - DNA, 25 bp, Homo sapiens
ttttccttaaatgctctgtacaatc

SEQ ID NO: 22348 - DNA, 25 bp, Homo sapiens
aaggatccattgtaccgttgtcttc

SEQ ID NO: 22349 - DNA, 25 bp, Homo sapiens
aatggccttaacttggattgtctgt

SEQ ID NO: 22350 - DNA, 25 bp, Homo sapiens
atggaaaagcccgccagcagtggcg

SEQ ID NO: 22351 - DNA, 25 bp, Homo sapiens
atgggatgattgtccacattctttc

SEQ ID NO: 22352 - DNA, 25 bp, Homo sapiens
gcagcacctccaggatacataaatt

SEQ ID NO: 22353 - DNA, 25 bp, Homo sapiens
gtccgtgtgatggaaaagcccgcca

SEQ ID NO: 22354 - DNA, 25 bp, Homo sapiens
gtgtgtgtgctcctggtgttaggag

SEQ ID NO: 22355 - DNA, 25 bp, Homo sapiens
gtttttctccactgagcacttaaca

SEQ ID NO: 22356 - DNA, 25 bp, Homo sapiens
taaagatttgtacctgcgtccgtgt

SEQ ID NO: 22357 - DNA, 25 bp, Homo sapiens
taccgttgtcttcatcactgggaaa

SEQ ID NO: 22358 - DNA, 25 bp, Homo sapiens
taggaagtttctccttttcacacct

SEQ ID NO: 22359 - DNA, 25 bp, Homo sapiens
agaaaagcagcagacgtcggtccgc

SEQ ID NO: 22360 - DNA, 25 bp, Homo sapiens
cagtgccagagccagagctggatcc

SEQ ID NO: 22361 - DNA, 25 bp, Homo sapiens
ccagagccagagctggatccggggc

SEQ ID NO: 22362 - DNA, 25 bp, Homo sapiens
gcttcgcgtcaagagggtatttttc

SEQ ID NO: 22363 - DNA, 25 bp, Homo sapiens
ggcagcaatgccgcagaaaagcagc

SEQ ID NO: 22364 - DNA, 25 bp, Homo sapiens
gtggcttcgcgtcaagagggtattt

SEQ ID NO: 22365 - DNA, 25 bp, Homo sapiens
gttcgggcagcaatgccgcagaaaa

SEQ ID NO: 22366 - DNA, 25 bp, Homo sapiens
tcgcgtcaagagggtatttttccta

SEQ ID NO: 22367 - DNA, 25 bp, Homo sapiens
tcgttcgggcagcaatgccgcagaa

SEQ ID NO: 22368 - DNA, 25 bp, Homo sapiens
tcttcccaggagagaaaccccaatt

SEQ ID NO: 22369 - DNA, 25 bp, Homo sapiens
ttcgttcgttcgggcagcaatgccg

SEQ ID NO: 22370 - DNA, 25 bp, Homo sapiens
aaactgctctcaacgtaggaatctt

SEQ ID NO: 22371 - DNA, 25 bp, Homo sapiens
atggtcttttattttgactgttttg

SEQ ID NO: 22372 - DNA, 25 bp, Homo sapiens
gaaattttaaactgctctcaacgta

SEQ ID NO: 22373 - DNA, 25 bp, Homo sapiens
gaatctcgacagctctgagaatcac

SEQ ID NO: 22374 - DNA, 25 bp, Homo sapiens
gaatgcaatgagcttggccaagggg

SEQ ID NO: 22375 - DNA, 25 bp, Homo sapiens
ggaaaagttcctacctgaggtctga

SEQ ID NO: 22376 - DNA, 25 bp, Homo sapiens
ggaaactttgaatctcgacagctct

SEQ ID NO: 22377 - DNA, 25 bp, Homo sapiens
ggataatgttataccccggactatg

SEQ ID NO: 22378 - DNA, 25 bp, Homo sapiens
ggctacttacctttaattgccagca

SEQ ID NO: 22379 - DNA, 25 bp, Homo sapiens
gtgcaatcttgtgtaatggtctttt

SEQ ID NO: 22380 - DNA, 25 bp, Homo sapiens
ttggccaaggggactttgaatccag

SEQ ID NO: 22381 - DNA, 25 bp, Homo sapiens
aactggagggactgtgatccttcca

SEQ ID NO: 22382 - DNA, 25 bp, Homo sapiens
actttagctgtagaaccttgggcaa

SEQ ID NO: 22383 - DNA, 25 bp, Homo sapiens
ctgggttttaatcctactttagctg

SEQ ID NO: 22384 - DNA, 25 bp, Homo sapiens
gaagaggcttacctgacagccagcc

SEQ ID NO: 22385 - DNA, 25 bp, Homo sapiens
gagcctgggaaggagtgctttcaaa

SEQ ID NO: 22386 - DNA, 25 bp, Homo sapiens
gagtcagctcattaaatcttgaaga

SEQ ID NO: 22387 - DNA, 25 bp, Homo sapiens
gagtgctttcaaaacctgtattttt

SEQ ID NO: 22388 - DNA, 25 bp, Homo sapiens
gctcggccagagctctgggttttaa

SEQ ID NO: 22389 - DNA, 25 bp, Homo sapiens
tctaagtcatgtctgctgcctgtga

SEQ ID NO: 22390 - DNA, 25 bp, Homo sapiens
tgctgcctgtgagcctgggaaggag

SEQ ID NO: 22391 - DNA, 25 bp, Homo sapiens
tttccttctaagtcatgtctgctgc

SEQ ID NO: 22392 - DNA, 25 bp, Homo sapiens
aatatccatgtaacggtgcatcaat

SEQ ID NO: 22393 - DNA, 25 bp, Homo sapiens
aatgcacatctcagttacaagcagt

SEQ ID NO: 22394 - DNA, 25 bp, Homo sapiens
atgacagctgtctaaaggttttttt

SEQ ID NO: 22395 - DNA, 25 bp, Homo sapiens
cagtatagtaccttattttctgctg

SEQ ID NO: 22396 - DNA, 25 bp, Homo sapiens
gtaacggtgcatcaatatattgcta

SEQ ID NO: 22397 - DNA, 25 bp, Homo sapiens
gttaagtgggtgtcaaactccaaga

SEQ ID NO: 22398 - DNA, 25 bp, Homo sapiens
gttacaagcagtactcatagtttaa

SEQ ID NO: 22399 - DNA, 25 bp, Homo sapiens
tacaattgtcctttactgtactttt

SEQ ID NO: 22400 - DNA, 25 bp, Homo sapiens
tacactttctataacttctattgaa

SEQ ID NO: 22401 - DNA, 25 bp, Homo sapiens
tttccaatttttcatgtgtactatg

SEQ ID NO: 22402 - DNA, 25 bp, Homo sapiens
ttttaaatctaacatcggatggctt

SEQ ID NO: 22403 - DNA, 25 bp, Homo sapiens
aattccatcgggagtcctacatcac

SEQ ID NO: 22404 - DNA, 25 bp, Homo sapiens
aatttagcataccacagtgctctga

SEQ ID NO: 22405 - DNA, 25 bp, Homo sapiens
agaaagtacttcctatccacatgtg

SEQ ID NO: 22406 - DNA, 25 bp, Homo sapiens
agtgctctgaagatgggtcattgac

SEQ ID NO: 22407 - DNA, 25 bp, Homo sapiens
caaaaaaggtgactccctttctcat

SEQ ID NO: 22408 - DNA, 25 bp, Homo sapiens
ggaggtacctgtctactttatctac

SEQ ID NO: 22409 - DNA, 25 bp, Homo sapiens
ggagtcctacatcactaacagtggt

SEQ ID NO: 22410 - DNA, 25 bp, Homo sapiens
ggctttctctaatccatgcaaacta

SEQ ID NO: 22411 - DNA, 25 bp, Homo sapiens
gggtcattgacgatgtaccatttgt

SEQ ID NO: 22412 - DNA, 25 bp, Homo sapiens
taagtattagctccctactacatcc

SEQ ID NO: 22413 - DNA, 25 bp, Homo sapiens
ttctgttctgttgtattgcgtccaa

SEQ ID NO: 22414 - DNA, 25 bp, Homo sapiens
ataacactgagcatatatttctatt

SEQ ID NO: 22415 - DNA, 25 bp, Homo sapiens
cagcttactctaagttttgggggtg

SEQ ID NO: 22416 - DNA, 25 bp, Homo sapiens
gcaactgcaatagccttaagtgtta

SEQ ID NO: 22417 - DNA, 25 bp, Homo sapiens
gctcatgagcgtaagaagtggttgt

SEQ ID NO: 22418 - DNA, 25 bp, Homo sapiens
gttatctctgctatgctcatgagcg

SEQ ID NO: 22419 - DNA, 25 bp, Homo sapiens
gttgttttcagcttactctaagttt

SEQ ID NO: 22420 - DNA, 25 bp, Homo sapiens
tatataactgtattaaccacaacat

SEQ ID NO: 22421 - DNA, 25 bp, Homo sapiens
tattccttaaatacagcaactgcaa

SEQ ID NO: 22422 - DNA, 25 bp, Homo sapiens
tccatttttaccttcgctgtcagga

SEQ ID NO: 22423 - DNA, 25 bp, Homo sapiens
tcgctgtcaggaaactcaaggtcaa

SEQ ID NO: 22424 - DNA, 25 bp, Homo sapiens
tttgggggtgattcgttatataact

SEQ ID NO: 22425 - DNA, 25 bp, Homo sapiens
aaacctcccctatatctatcaaagt

SEQ ID NO: 22426 - DNA, 25 bp, Homo sapiens
aaccttctcatatatcttgtggctt

SEQ ID NO: 22427 - DNA, 25 bp, Homo sapiens
atgtaactgtaggctggactcagca

SEQ ID NO: 22428 - DNA, 25 bp, Homo sapiens
gacactaagctactgttcaaattgc

SEQ ID NO: 22429 - DNA, 25 bp, Homo sapiens
gactgttctcaaaagacactaagct

SEQ ID NO: 22430 - DNA, 25 bp, Homo sapiens
ggactcagcaacttacacctgtaat

SEQ ID NO: 22431 - DNA, 25 bp, Homo sapiens
ggggaatcaactagactgttctcaa

SEQ ID NO: 22432 - DNA, 25 bp, Homo sapiens
ggtgtggtcatgcatacctgcagtc

SEQ ID NO: 22433 - DNA, 25 bp, Homo sapiens
gttgaactgcagcttatttgtatgt

SEQ ID NO: 22434 - DNA, 25 bp, Homo sapiens
ttaaattgtgaccagctttaccact

SEQ ID NO: 22435 - DNA, 25 bp, Homo sapiens
ttcttagaacaaacctcccctatat

SEQ ID NO: 22436 - DNA, 25 bp, Homo sapiens
aagtgatatttattgttctccccga

SEQ ID NO: 22437 - DNA, 25 bp, Homo sapiens
attgccccagataacacgggccctg

SEQ ID NO: 22438 - DNA, 25 bp, Homo sapiens
caagcaaggaatacgttcccccagc

SEQ ID NO: 22439 - DNA, 25 bp, Homo sapiens
caccctgccccaagggcaagcaagg

SEQ ID NO: 22440 - DNA, 25 bp, Homo sapiens
cgactattgccccagataacacggg

SEQ ID NO: 22441 - DNA, 25 bp, Homo sapiens
cgcctgcaggcggtgtagatacatg

SEQ ID NO: 22442 - DNA, 25 bp, Homo sapiens
cggccggcagttgcagtgtagacag

SEQ ID NO: 22443 - DNA, 25 bp, Homo sapiens
ctgtagatactgtagataccgcccc

SEQ ID NO: 22444 - DNA, 25 bp, Homo sapiens
gcgcccggtcggaggcggaaggaag

SEQ ID NO: 22445 - DNA, 25 bp, Homo sapiens
gtcggaggcggaaggaagtgatatt

SEQ ID NO: 22446 - DNA, 25 bp, Homo sapiens
ttgcagtgtagacagcccgagagcc

SEQ ID NO: 22447 - DNA, 25 bp, Homo sapiens
acgtgcttgaaacaatcacacagga

SEQ ID NO: 22448 - DNA, 25 bp, Homo sapiens
atacggggtggtaactgagtttgtg

SEQ ID NO: 22449 - DNA, 25 bp, Homo sapiens
atcacacaggacacttttctacatt

SEQ ID NO: 22450 - DNA, 25 bp, Homo sapiens
atgtatgccaatttggtgctttttg

SEQ ID NO: 22451 - DNA, 25 bp, Homo sapiens
gaagccaggttgatacagctgccca

SEQ ID NO: 22452 - DNA, 25 bp, Homo sapiens
gcactcacagggacgatgtgctgta

SEQ ID NO: 22453 - DNA, 25 bp, Homo sapiens
ggaacttttgtataataatgcctgg

SEQ ID NO: 22454 - DNA, 25 bp, Homo sapiens
ggaggatggggtagcactcacaggg

SEQ ID NO: 22455 - DNA, 25 bp, Homo sapiens
gtatttcagtgtctatcccagacat

SEQ ID NO: 22456 - DNA, 25 bp, Homo sapiens
gtcattgggtgacctgcgattgtca

SEQ ID NO: 22457 - DNA, 25 bp, Homo sapiens
gtctatcccagacatacggggtggt

SEQ ID NO: 22458 - DNA, 25 bp, Homo sapiens
agacaccttggtcacaacatcttgc

SEQ ID NO: 22459 - DNA, 25 bp, Homo sapiens
agatgcaactgcccagtcttggact

SEQ ID NO: 22460 - DNA, 25 bp, Homo sapiens
atcttgcattctctcgggatgctga

SEQ ID NO: 22461 - DNA, 25 bp, Homo sapiens
atgagtcaaagcaatgtgagtccct

SEQ ID NO: 22462 - DNA, 25 bp, Homo sapiens
atgtgagtccctcaccagatgcaac

SEQ ID NO: 22463 - DNA, 25 bp, Homo sapiens
cggaatggcctgagccgaagccagc

SEQ ID NO: 22464 - DNA, 25 bp, Homo sapiens
cttggtcacaacatcttgcattctc

SEQ ID NO: 22465 - DNA, 25 bp, Homo sapiens
gacttgcgtttgatatttagacacc

SEQ ID NO: 22466 - DNA, 25 bp, Homo sapiens
gcaatgtgagtccctcaccagatgc

SEQ ID NO: 22467 - DNA, 25 bp, Homo sapiens
gcgtttgatatttagacaccttggt

SEQ ID NO: 22468 - DNA, 25 bp, Homo sapiens
ttgcattctctcgggatgctgattt

SEQ ID NO: 22469 - DNA, 25 bp, Homo sapiens
aatggagtggtagtgcaggctgctt

SEQ ID NO: 22470 - DNA, 25 bp, Homo sapiens
aggacaggcttttgccatgtgggca

SEQ ID NO: 22471 - DNA, 25 bp, Homo sapiens
caaactccaatcagccttttacctg

SEQ ID NO: 22472 - DNA, 25 bp, Homo sapiens
ctgaactcacagtgacccacagact

SEQ ID NO: 22473 - DNA, 25 bp, Homo sapiens
gaacactcaggctacctaggtcttc

SEQ ID NO: 22474 - DNA, 25 bp, Homo sapiens
gactgctgctggatgaacactcagg

SEQ ID NO: 22475 - DNA, 25 bp, Homo sapiens
gctacctaggtcttctcataatgga

SEQ ID NO: 22476 - DNA, 25 bp, Homo sapiens
gtgcaggctgcttgttcagctagaa

SEQ ID NO: 22477 - DNA, 25 bp, Homo sapiens
taggatggttgtattctctgccaca

SEQ ID NO: 22478 - DNA, 25 bp, Homo sapiens
tctctcagtggtgccgcatctaaag

SEQ ID NO: 22479 - DNA, 25 bp, Homo sapiens
ttctctgccacagttgtccggagag

SEQ ID NO: 22480 - DNA, 25 bp, Homo sapiens
aattgccgctcctgcaaattgagat

SEQ ID NO: 22481 - DNA, 25 bp, Homo sapiens
agctctgttgatgatgacgttgata

SEQ ID NO: 22482 - DNA, 25 bp, Homo sapiens
agtagctctgctgatgatgacgttg

SEQ ID NO: 22483 - DNA, 25 bp, Homo sapiens
ataaccaaactgttctgtggtctta

SEQ ID NO: 22484 - DNA, 25 bp, Homo sapiens
gacaagttacttaagctctcagagc

SEQ ID NO: 22485 - DNA, 25 bp, Homo sapiens
gacgttgataaccaaactgttctgt

SEQ ID NO: 22486 - DNA, 25 bp, Homo sapiens
gagataataatgcctgcctttcaag

SEQ ID NO: 22487 - DNA, 25 bp, Homo sapiens
gataaccaaactgttctgtggtctt

SEQ ID NO: 22488 - DNA, 25 bp, Homo sapiens
gctctgctgatgatgacgttgataa

SEQ ID NO: 22489 - DNA, 25 bp, Homo sapiens
gtagctctgctgatgatgacgttga

SEQ ID NO: 22490 - DNA, 25 bp, Homo sapiens
tcagagcatcaattgccgctcctgc

SEQ ID NO: 22491 - DNA, 25 bp, Homo sapiens
caaacatccagagagctgctttctc

SEQ ID NO: 22492 - DNA, 25 bp, Homo sapiens
cagcctcctaacctgagctttaaca

SEQ ID NO: 22493 - DNA, 25 bp, Homo sapiens
gaaaaagctgtctgaagttccttcc

SEQ ID NO: 22494 - DNA, 25 bp, Homo sapiens
ggtccacagagaatagtccatgatc

SEQ ID NO: 22495 - DNA, 25 bp, Homo sapiens
gtccccccaatagtgacacctaggg

SEQ ID NO: 22496 - DNA, 25 bp, Homo sapiens
gtgtgagtcacttaatatctttgga

SEQ ID NO: 22497 - DNA, 25 bp, Homo sapiens
tcccacaggtctgactgccagagag

SEQ ID NO: 22498 - DNA, 25 bp, Homo sapiens
tgaagttccttccaagcttatcagc

SEQ ID NO: 22499 - DNA, 25 bp, Homo sapiens
tgctgtgctgtcatttcaggtctgc

SEQ ID NO: 22500 - DNA, 25 bp, Homo sapiens
tggtagagtcctagtgtgccaatcc

SEQ ID NO: 22501 - DNA, 25 bp, Homo sapiens
ttcaccacctcaggagcaacagcag

SEQ ID NO: 22502 - DNA, 25 bp, Homo sapiens
aaggattttcgcttgttgatgattt

SEQ ID NO: 22503 - DNA, 25 bp, Homo sapiens
aatatgcctaggttttgtatgttta

SEQ ID NO: 22504 - DNA, 25 bp, Homo sapiens
caaattgagtcatacttgctgatta

SEQ ID NO: 22505 - DNA, 25 bp, Homo sapiens
cctctgagtttatttgcataccata

SEQ ID NO: 22506 - DNA, 25 bp, Homo sapiens
ctgggtgttcctatttaaatctatt

SEQ ID NO: 22507 - DNA, 25 bp, Homo sapiens
gagctcagaggtcttccagagattt

SEQ ID NO: 22508 - DNA, 25 bp, Homo sapiens
gtattcacaagtttacctctgagtt

SEQ ID NO: 22509 - DNA, 25 bp, Homo sapiens
taccatagtttactgggtgttccta

SEQ ID NO: 22510 - DNA, 25 bp, Homo sapiens
tactgtacctaatgcattcccacat

SEQ ID NO: 22511 - DNA, 25 bp, Homo sapiens
tattcaagactactcacggaatctc

SEQ ID NO: 22512 - DNA, 25 bp, Homo sapiens
tcccacatcgctattgataaggatt

SEQ ID NO: 22513 - DNA, 25 bp, Homo sapiens
agaaactggtgacttggtccatcag

SEQ ID NO: 22514 - DNA, 25 bp, Homo sapiens
attattggtttgtgttgctctgggg

SEQ ID NO: 22515 - DNA, 25 bp, Homo sapiens
attttatattgttgcatgctgtaga

SEQ ID NO: 22516 - DNA, 25 bp, Homo sapiens
gaacagtctctgtaaggctctctgt

SEQ ID NO: 22517 - DNA, 25 bp, Homo sapiens
gaagttctttctattctcgtttagt

SEQ ID NO: 22518 - DNA, 25 bp, Homo sapiens
gagaatttcagatctgggtttttga

SEQ ID NO: 22519 - DNA, 25 bp, Homo sapiens
ggtccatcagtcacgaagttctttc

SEQ ID NO: 22520 - DNA, 25 bp, Homo sapiens
gttgctctggggaaattggaaatca

SEQ ID NO: 22521 - DNA, 25 bp, Homo sapiens
taatgtgcattcctcattacctctc

SEQ ID NO: 22522 - DNA, 25 bp, Homo sapiens
tctccacacgcacagtttgctgcaa

SEQ ID NO: 22523 - DNA, 25 bp, Homo sapiens
ttctattctcgtttagttttcaaga

SEQ ID NO: 22524 - DNA, 25 bp, Homo sapiens
aaacccacttccacaagcttaatga

SEQ ID NO: 22525 - DNA, 25 bp, Homo sapiens
aatccaacctattcatggtgtcctc

SEQ ID NO: 22526 - DNA, 25 bp, Homo sapiens
agattgtcccaggccatatctattc

SEQ ID NO: 22527 - DNA, 25 bp, Homo sapiens
ctgcttcctagcaggacagctggca

SEQ ID NO: 22528 - DNA, 25 bp, Homo sapiens
gcatgcattgtttgactagccagct

SEQ ID NO: 22529 - DNA, 25 bp, Homo sapiens
gtgagtagtcttcttactttttctg

SEQ ID NO: 22530 - DNA, 25 bp, Homo sapiens
tagtggagccaaaggcacgtcttca

SEQ ID NO: 22531 - DNA, 25 bp, Homo sapiens
tattcccagttctttgtgagtagtc

SEQ ID NO: 22532 - DNA, 25 bp, Homo sapiens
tcaatttcacgaaacccacttccac

SEQ ID NO: 22533 - DNA, 25 bp, Homo sapiens
tggtgtcctcacttattgtggtcaa

SEQ ID NO: 22534 - DNA, 25 bp, Homo sapiens
ttgtatggtattcctgcttcctagc

SEQ ID NO: 22535 - DNA, 25 bp, Homo sapiens
aaaaggctctgctttgacctgaagt

SEQ ID NO: 22536 - DNA, 25 bp, Homo sapiens
atctatcctcagtctcaggacactg

SEQ ID NO: 22537 - DNA, 25 bp, Homo sapiens
ctggcctttatgatttctgctgaga

SEQ ID NO: 22538 - DNA, 25 bp, Homo sapiens
gaaggaagactccatctgatgactc

SEQ ID NO: 22539 - DNA, 25 bp, Homo sapiens
gaattaaggccaagcacatctgcaa

SEQ ID NO: 22540 - DNA, 25 bp, Homo sapiens
gacctgaagtattttatctatcctc

SEQ ID NO: 22541 - DNA, 25 bp, Homo sapiens
ggggcaagctgaatatatcttaggc

SEQ ID NO: 22542 - DNA, 25 bp, Homo sapiens
tagcaccaatgacctgaagagcctt

SEQ ID NO: 22543 - DNA, 25 bp, Homo sapiens
ttagtctgatggggtctccttcata

SEQ ID NO: 22544 - DNA, 25 bp, Homo sapiens
ttccactgttttctggcctttatga

SEQ ID NO: 22545 - DNA, 25 bp, Homo sapiens
ttgaaaatgccattccactgttttc

SEQ ID NO: 22546 - DNA, 25 bp, Homo sapiens
accgcatgctggccgacatgatggg

SEQ ID NO: 22547 - DNA, 25 bp, Homo sapiens
acgcccgcagggacttcgagagggc

SEQ ID NO: 22548 - DNA, 25 bp, Homo sapiens
agccctggagaggtttggccaagcc

SEQ ID NO: 22549 - DNA, 25 bp, Homo sapiens
cctgctgcctgagagggcttcagcc

SEQ ID NO: 22550 - DNA, 25 bp, Homo sapiens
cgcagggacttcgagagggcggcac

SEQ ID NO: 22551 - DNA, 25 bp, Homo sapiens
ctgaaccaataaagccgtcgggcct

SEQ ID NO: 22552 - DNA, 25 bp, Homo sapiens
ctggaacgcgcggtggagctgagcg

SEQ ID NO: 22553 - DNA, 25 bp, Homo sapiens
gaaccaataaagccgtcgggcctca

SEQ ID NO: 22554 - DNA, 25 bp, Homo sapiens
gcacagccctggagaggtttggcca

SEQ ID NO: 22555 - DNA, 25 bp, Homo sapiens
ggactgggccctgaaccaataaagc

SEQ ID NO: 22556 - DNA, 25 bp, Homo sapiens
gggccctgaaccaataaagccgtcg

SEQ ID NO: 22557 - DNA, 25 bp, Homo sapiens
aattggttccagctatctaagatac

SEQ ID NO: 22558 - DNA, 25 bp, Homo sapiens
acacgcgcacacacggtagagataa

SEQ ID NO: 22559 - DNA, 25 bp, Homo sapiens
agtcaattcctgcttctttcaaaaa

SEQ ID NO: 22560 - DNA, 25 bp, Homo sapiens
gaaaatccagctcaatgttactaga

SEQ ID NO: 22561 - DNA, 25 bp, Homo sapiens
gaaatggggctggtaccttcaatat

SEQ ID NO: 22562 - DNA, 25 bp, Homo sapiens
gacaacaaacttttctcgtcaattt

SEQ ID NO: 22563 - DNA, 25 bp, Homo sapiens
gagaggccttatcaatcctgacaac

SEQ ID NO: 22564 - DNA, 25 bp, Homo sapiens
ggactctcactattaggcagtaacc

SEQ ID NO: 22565 - DNA, 25 bp, Homo sapiens
gtttcccagattcaccttgttatac

SEQ ID NO: 22566 - DNA, 25 bp, Homo sapiens
taggcagtaacctaccattcacctc

SEQ ID NO: 22567 - DNA, 25 bp, Homo sapiens
tagtgtggctttctaggactctcac

SEQ ID NO: 22568 - DNA, 25 bp, Homo sapiens
aaaatacatccctatgccttcatac

SEQ ID NO: 22569 - DNA, 25 bp, Homo sapiens
aatggaatccatgtgtttgcaaaaa

SEQ ID NO: 22570 - DNA, 25 bp, Homo sapiens
acttaggatacttctgactggtttt

SEQ ID NO: 22571 - DNA, 25 bp, Homo sapiens
ccttcataccattctcagctggatt

SEQ ID NO: 22572 - DNA, 25 bp, Homo sapiens
ctcaagctgacttccactgcgaagg

SEQ ID NO: 22573 - DNA, 25 bp, Homo sapiens
gactggttttgacatccattaacag

SEQ ID NO: 22574 - DNA, 25 bp, Homo sapiens
gcattacttttatctctgcaaatat

SEQ ID NO: 22575 - DNA, 25 bp, Homo sapiens
gtggcagtggcattaactctgctcc

SEQ ID NO: 22576 - DNA, 25 bp, Homo sapiens
tcaaaactccactcagtatctgcat

SEQ ID NO: 22577 - DNA, 25 bp, Homo sapiens
tgctaattttaagtcctttcgtata

SEQ ID NO: 22578 - DNA, 25 bp, Homo sapiens
tgttcgtcaagttgtcctcaagtcc

SEQ ID NO: 22579 - DNA, 25 bp, Homo sapiens
aaaggatatcttggtcctcaatgtg

SEQ ID NO: 22580 - DNA, 25 bp, Homo sapiens
aagtgcctctgtaaaaaaggatatc

SEQ ID NO: 22581 - DNA, 25 bp, Homo sapiens
aatgtgagccagcatgtcgtcatgg

SEQ ID NO: 22582 - DNA, 25 bp, Homo sapiens
acaagtggacagaaacatccgcaga

SEQ ID NO: 22583 - DNA, 25 bp, Homo sapiens
acagaaacatccgcagagtgaccag

SEQ ID NO: 22584 - DNA, 25 bp, Homo sapiens
gaccgaacaagtgcctctgtaaaaa

SEQ ID NO: 22585 - DNA, 25 bp, Homo sapiens
gatatcttggtcctcaatgtgaaca

SEQ ID NO: 22586 - DNA, 25 bp, Homo sapiens
ggaggtgtctgtgttagaccgaaca

SEQ ID NO: 22587 - DNA, 25 bp, Homo sapiens
gttagaccgaacaagtgcctctgta

SEQ ID NO: 22588 - DNA, 25 bp, Homo sapiens
tagaccgaacaagtgcctctgtaaa

SEQ ID NO: 22589 - DNA, 25 bp, Homo sapiens
ttggtcctcaatgtgaacaagtgga

SEQ ID NO: 22590 - DNA, 25 bp, Homo sapiens
aaaaagcatttggtctcactcttct

SEQ ID NO: 22591 - DNA, 25 bp, Homo sapiens
aaatctttatcatttatggctaatt

SEQ ID NO: 22592 - DNA, 25 bp, Homo sapiens
agatgtttaaatctccttcatattt

SEQ ID NO: 22593 - DNA, 25 bp, Homo sapiens
cctttgccaaatcatatctattttc

SEQ ID NO: 22594 - DNA, 25 bp, Homo sapiens
gagactggatagttatcagcacaat

SEQ ID NO: 22595 - DNA, 25 bp, Homo sapiens
gagagcaaaatacatttcctgattt

SEQ ID NO: 22596 - DNA, 25 bp, Homo sapiens
gcagctcatcttagtgctaatgaca

SEQ ID NO: 22597 - DNA, 25 bp, Homo sapiens
taaatccctttatactcatcagtca

SEQ ID NO: 22598 - DNA, 25 bp, Homo sapiens
tcatatctattttcttcaagagagc

SEQ ID NO: 22599 - DNA, 25 bp, Homo sapiens
tccctttatactcatcagtcattat

SEQ ID NO: 22600 - DNA, 25 bp, Homo sapiens
tgctgatctctttaactcctgaata

SEQ ID NO: 22601 - DNA, 25 bp, Homo sapiens
aaacgattgaatccaaacaaccaga

SEQ ID NO: 22602 - DNA, 25 bp, Homo sapiens
aagatggatgtttggtgcccttgtc

SEQ ID NO: 22603 - DNA, 25 bp, Homo sapiens
agagatgtgatttgtgtctgtgtga

SEQ ID NO: 22604 - DNA, 25 bp, Homo sapiens
atctctgtgcttcatagctggtcta

SEQ ID NO: 22605 - DNA, 25 bp, Homo sapiens
catagctggtctaatgtgggccctt

SEQ ID NO: 22606 - DNA, 25 bp, Homo sapiens
ccttgtcaatctctgtgcttcatag

SEQ ID NO: 22607 - DNA, 25 bp, Homo sapiens
gacaaagcggcttgcggtgtttcaa

SEQ ID NO: 22608 - DNA, 25 bp, Homo sapiens
ggtgattttgtctctgtacactaaa

SEQ ID NO: 22609 - DNA, 25 bp, Homo sapiens
tctaatgtgggcccttagttctcac

SEQ ID NO: 22610 - DNA, 25 bp, Homo sapiens
tgaaatgttggttgtgcttttttaa

SEQ ID NO: 22611 - DNA, 25 bp, Homo sapiens
tgtgtctgtgtgatgcaggctggtc

SEQ ID NO: 22612 - DNA, 25 bp, Homo sapiens
aaggatgccacagggtacaccctct

SEQ ID NO: 22613 - DNA, 25 bp, Homo sapiens
aggtcatggccctgggaacacactt

SEQ ID NO: 22614 - DNA, 25 bp, Homo sapiens
atcactgtaccctattgaaccatct

SEQ ID NO: 22615 - DNA, 25 bp, Homo sapiens
cctctctgctgtcatgactcaggac

SEQ ID NO: 22616 - DNA, 25 bp, Homo sapiens
cctgggctatggggttctgggttga

SEQ ID NO: 22617 - DNA, 25 bp, Homo sapiens
ctaaggcagggcagcctacaaccca

SEQ ID NO: 22618 - DNA, 25 bp, Homo sapiens
gaggtgaggggtagcatgctcctgt

SEQ ID NO: 22619 - DNA, 25 bp, Homo sapiens
gcagcccctgaagacatcactgtac

SEQ ID NO: 22620 - DNA, 25 bp, Homo sapiens
gtgatgctattgttacgctgatccc

SEQ ID NO: 22621 - DNA, 25 bp, Homo sapiens
tcctggtcacagctgagtcttcgga

SEQ ID NO: 22622 - DNA, 25 bp, Homo sapiens
tccttttctttctgggtcatttctg

SEQ ID NO: 22623 - DNA, 25 bp, Homo sapiens
catgcccatcttagaagccagtcaa

SEQ ID NO: 22624 - DNA, 25 bp, Homo sapiens
cctccgtcctgataagacgtccacc

SEQ ID NO: 22625 - DNA, 25 bp, Homo sapiens
ctaatgcggaggctgcttgctgtgc

SEQ ID NO: 22626 - DNA, 25 bp, Homo sapiens
gaagccagtcaagctatggaactaa

SEQ ID NO: 22627 - DNA, 25 bp, Homo sapiens
gagccaaagaggggatgctttgaga

SEQ ID NO: 22628 - DNA, 25 bp, Homo sapiens
gattctggatcttgacatgcccatc

SEQ ID NO: 22629 - DNA, 25 bp, Homo sapiens
gcaacaagacagactgtccccaaga

SEQ ID NO: 22630 - DNA, 25 bp, Homo sapiens
gctatggaactaatgcggaggctgc

SEQ ID NO: 22631 - DNA, 25 bp, Homo sapiens
ggcttccctagatgtcactggacag

SEQ ID NO: 22632 - DNA, 25 bp, Homo sapiens
gtgctggctttgcaacaagacagac

SEQ ID NO: 22633 - DNA, 25 bp, Homo sapiens
tgctttgagattctggatcttgaca

SEQ ID NO: 22634 - DNA, 25 bp, Homo sapiens
aggcagcaggacttggataaggagt

SEQ ID NO: 22635 - DNA, 25 bp, Homo sapiens
ataaggagtacctgctggtcagcct

SEQ ID NO: 22636 - DNA, 25 bp, Homo sapiens
atgagaacatgccataccctggtgc

SEQ ID NO: 22637 - DNA, 25 bp, Homo sapiens
catcttcatctttgtattactagca

SEQ ID NO: 22638 - DNA, 25 bp, Homo sapiens
gcactgacatttctagtttgccccc

SEQ ID NO: 22639 - DNA, 25 bp, Homo sapiens
gccaggcttaagccaaatctgcctt

SEQ ID NO: 22640 - DNA, 25 bp, Homo sapiens
gctggtcagccttgagatgcacagg

SEQ ID NO: 22641 - DNA, 25 bp, Homo sapiens
tattactagcatccagcagagtgcc

SEQ ID NO: 22642 - DNA, 25 bp, Homo sapiens
tcccaggtgcctcatccataatgag

SEQ ID NO: 22643 - DNA, 25 bp, Homo sapiens
tctcagccccaaaggcactgacatt

SEQ ID NO: 22644 - DNA, 25 bp, Homo sapiens
ttccccaggctcatttgagcaggtg

SEQ ID NO: 22645 - DNA, 25 bp, Homo sapiens
aggtcatctgatacacagtgttaca

SEQ ID NO: 22646 - DNA, 25 bp, Homo sapiens
agttgttatacttcatgatgtttct

SEQ ID NO: 22647 - DNA, 25 bp, Homo sapiens
atagctgactatttgggcatccttc

SEQ ID NO: 22648 - DNA, 25 bp, Homo sapiens
caaaaccacgattgtgtgccccttt

SEQ ID NO: 22649 - DNA, 25 bp, Homo sapiens
ccaactctatggctaaggtcatctg

SEQ ID NO: 22650 - DNA, 25 bp, Homo sapiens
gaagctctaaagaccaactctatgg

SEQ ID NO: 22651 - DNA, 25 bp, Homo sapiens
gtaccactcctattctgttatctgg

SEQ ID NO: 22652 - DNA, 25 bp, Homo sapiens
tatctggagaccacaagtaccactc

SEQ ID NO: 22653 - DNA, 25 bp, Homo sapiens
tccttcatgcaatggatggctttgt

SEQ ID NO: 22654 - DNA, 25 bp, Homo sapiens
tcttaaaagctttttgcccctcaag

SEQ ID NO: 22655 - DNA, 25 bp, Homo sapiens
ttgcccctcaagacaggactgctta

SEQ ID NO: 22656 - DNA, 25 bp, Homo sapiens
aatcctcagttgtcacgcagaagaa

SEQ ID NO: 22657 - DNA, 25 bp, Homo sapiens
aatttcctgtgatgtgtttcaatct

SEQ ID NO: 22658 - DNA, 25 bp, Homo sapiens
agccgttggtctttgaaatttcctg

SEQ ID NO: 22659 - DNA, 25 bp, Homo sapiens
agtattttacagtatcaccaaatat

SEQ ID NO: 22660 - DNA, 25 bp, Homo sapiens
attaaaatcctcagttgtcacgcag

SEQ ID NO: 22661 - DNA, 25 bp, Homo sapiens
gaaaaatcaaagtgctcgagtggtt

SEQ ID NO: 22662 - DNA, 25 bp, Homo sapiens
gtgatgtgtttcaatctagatgcaa

SEQ ID NO: 22663 - DNA, 25 bp, Homo sapiens
tatagactataatacttttccaatt

SEQ ID NO: 22664 - DNA, 25 bp, Homo sapiens
tatgttttgggtattcctgtttata

SEQ ID NO: 22665 - DNA, 25 bp, Homo sapiens
tattttgtttagccaaggtatagga

SEQ ID NO: 22666 - DNA, 25 bp, Homo sapiens
tgtatttgattgccagttttactga

SEQ ID NO: 22667 - DNA, 25 bp, Homo sapiens
aatgggtaacaactgctgagctcaa

SEQ ID NO: 22668 - DNA, 25 bp, Homo sapiens
aatgttcttaactatcgtctctgta

SEQ ID NO: 22669 - DNA, 25 bp, Homo sapiens
actatcgtctctgtaattcctttat

SEQ ID NO: 22670 - DNA, 25 bp, Homo sapiens
acttctctggcatttaatcattaat

SEQ ID NO: 22671 - DNA, 25 bp, Homo sapiens
gatgacaactgctaaggtccataaa

SEQ ID NO: 22672 - DNA, 25 bp, Homo sapiens
gattgttaaaacttctctggcattt

SEQ ID NO: 22673 - DNA, 25 bp, Homo sapiens
gggaaacctcaagtgtaggtctaat

SEQ ID NO: 22674 - DNA, 25 bp, Homo sapiens
ggtctaattagtgtttctgggatcc

SEQ ID NO: 22675 - DNA, 25 bp, Homo sapiens
gtgggacatgctctggtaacacaca

SEQ ID NO: 22676 - DNA, 25 bp, Homo sapiens
gtttacaccctcttgtcagcaaaac

SEQ ID NO: 22677 - DNA, 25 bp, Homo sapiens
ttttattgcctggatctgctttaaa

SEQ ID NO: 22678 - DNA, 25 bp, Homo sapiens
agtgccctgcttgttatgaatctaa

SEQ ID NO: 22679 - DNA, 25 bp, Homo sapiens
caaccacttcccacaacgtgggctc

SEQ ID NO: 22680 - DNA, 25 bp, Homo sapiens
caggcaatgccgacagctgccttgt

SEQ ID NO: 22681 - DNA, 25 bp, Homo sapiens
ccacctgtcagttcctgtctggtga

SEQ ID NO: 22682 - DNA, 25 bp, Homo sapiens
ctcccctgaagaacgtgtccagcaa

SEQ ID NO: 22683 - DNA, 25 bp, Homo sapiens
ctcttggaggagtcatctttcgaaa

SEQ ID NO: 22684 - DNA, 25 bp, Homo sapiens
gaacagtgtgtctttctagttgcag

SEQ ID NO: 22685 - DNA, 25 bp, Homo sapiens
gagtctcgtgctgaaaggctgttcc

SEQ ID NO: 22686 - DNA, 25 bp, Homo sapiens
ggagtcacaggtctccaggcaatgc

SEQ ID NO: 22687 - DNA, 25 bp, Homo sapiens
ggctgttccaacgtcagtaacgcca

SEQ ID NO: 22688 - DNA, 25 bp, Homo sapiens
tgtccagcaacgcagagtgccctgc

SEQ ID NO: 22689 - DNA, 25 bp, Homo sapiens
actcaaccgtcccagaaacatctga

SEQ ID NO: 22690 - DNA, 25 bp, Homo sapiens
atctgattctgcactttctaaccaa

SEQ ID NO: 22691 - DNA, 25 bp, Homo sapiens
atgaatgtttggtgtggcaggcctc

SEQ ID NO: 22692 - DNA, 25 bp, Homo sapiens
attttctgctggctgtggaaccacc

SEQ ID NO: 22693 - DNA, 25 bp, Homo sapiens
caaattatttttgcgacttccacta

SEQ ID NO: 22694 - DNA, 25 bp, Homo sapiens
gaaaactcaaggcaccataccaata

SEQ ID NO: 22695 - DNA, 25 bp, Homo sapiens
gaaccacctggtgaatgctgcacag

SEQ ID NO: 22696 - DNA, 25 bp, Homo sapiens
gattagatacttactcaaccgtccc

SEQ ID NO: 22697 - DNA, 25 bp, Homo sapiens
ggaagctttctgctcattactgaag

SEQ ID NO: 22698 - DNA, 25 bp, Homo sapiens
ggacagctggattggtcactttgca

SEQ ID NO: 22699 - DNA, 25 bp, Homo sapiens
ggcaggcctcctgagaaaagtagct

SEQ ID NO: 22700 - DNA, 25 bp, Homo sapiens
agaattttttgctttcataatgtga

SEQ ID NO: 22701 - DNA, 25 bp, Homo sapiens
agagctggaatgcactgattcagga

SEQ ID NO: 22702 - DNA, 25 bp, Homo sapiens
agatgggtgaatgttatggtgtgtg

SEQ ID NO: 22703 - DNA, 25 bp, Homo sapiens
ctagttgttcttctctagtctctac

SEQ ID NO: 22704 - DNA, 25 bp, Homo sapiens
ctttgcactgccagcacgtgagata

SEQ ID NO: 22705 - DNA, 25 bp, Homo sapiens
gaaaggtctgtatgtacacatttca

SEQ ID NO: 22706 - DNA, 25 bp, Homo sapiens
gccagcacgtgagatactaactttt

SEQ ID NO: 22707 - DNA, 25 bp, Homo sapiens
ggaatcaaaccataatgcacttatt

SEQ ID NO: 22708 - DNA, 25 bp, Homo sapiens
tcttctctagtctctacgttattag

SEQ ID NO: 22709 - DNA, 25 bp, Homo sapiens
tggtttaattcacccactttagatg

SEQ ID NO: 22710 - DNA, 25 bp, Homo sapiens
tttcagatagtttcaaatacaccaa

SEQ ID NO: 22711 - DNA, 25 bp, Homo sapiens
aaattggctccaaacctattcccat

SEQ ID NO: 22712 - DNA, 25 bp, Homo sapiens
aatgcaggggtcttacttggttatt

SEQ ID NO: 22713 - DNA, 25 bp, Homo sapiens
catcatcacccactaatgtcattac

SEQ ID NO: 22714 - DNA, 25 bp, Homo sapiens
gaatgaaatctgctttgaggcttgt

SEQ ID NO: 22715 - DNA, 25 bp, Homo sapiens
gagagtagcatataggccatgtgta

SEQ ID NO: 22716 - DNA, 25 bp, Homo sapiens
gaggcttgtattgttgttttccttc

SEQ ID NO: 22717 - DNA, 25 bp, Homo sapiens
gatcatattgtatcccaggtactag

SEQ ID NO: 22718 - DNA, 25 bp, Homo sapiens
gtcttcattttcatgagtaccttgt

SEQ ID NO: 22719 - DNA, 25 bp, Homo sapiens
taactaaacttctctagattacctt

SEQ ID NO: 22720 - DNA, 25 bp, Homo sapiens
tgattgaacacttccctttaactcc

SEQ ID NO: 22721 - DNA, 25 bp, Homo sapiens
ttatctagtcattttcaactgtgat

SEQ ID NO: 22722 - DNA, 25 bp, Homo sapiens
caaagccatctgtttgcatccttgt

SEQ ID NO: 22723 - DNA, 25 bp, Homo sapiens
ccccagagaccactcctgtggagag

SEQ ID NO: 22724 - DNA, 25 bp, Homo sapiens
cccctcacgcgaatttctttcaaag

SEQ ID NO: 22725 - DNA, 25 bp, Homo sapiens
cctcacacagcagtttgtaaccgca

SEQ ID NO: 22726 - DNA, 25 bp, Homo sapiens
gcctagccagtacatatttcagcac

SEQ ID NO: 22727 - DNA, 25 bp, Homo sapiens
ggagcgcccacgaagtgtagtggct

SEQ ID NO: 22728 - DNA, 25 bp, Homo sapiens
gtagtggctgacgatttcaacctca

SEQ ID NO: 22729 - DNA, 25 bp, Homo sapiens
tccgggagctcaggggaacgcccga

SEQ ID NO: 22730 - DNA, 25 bp, Homo sapiens
tgtgaatttagtcacccttagccct

SEQ ID NO: 22731 - DNA, 25 bp, Homo sapiens
ttagcccttcagataagcctagcca

SEQ ID NO: 22732 - DNA, 25 bp, Homo sapiens
ttgtaaccgcaagcattctctttga

SEQ ID NO: 22733 - DNA, 25 bp, Homo sapiens
acagcctagctgagtgcaaagaaat

SEQ ID NO: 22734 - DNA, 25 bp, Homo sapiens
acctcctgaggaataaatgctgaac

SEQ ID NO: 22735 - DNA, 25 bp, Homo sapiens
agcctggtcacctcctgaggaataa

SEQ ID NO: 22736 - DNA, 25 bp, Homo sapiens
aggccagtcttgagcagcagggagg

SEQ ID NO: 22737 - DNA, 25 bp, Homo sapiens
ctctttgtttctggggtggaactag

SEQ ID NO: 22738 - DNA, 25 bp, Homo sapiens
gactggacctaggagcttgagttgt

SEQ ID NO: 22739 - DNA, 25 bp, Homo sapiens
gtccctggagtctagactggaccta

SEQ ID NO: 22740 - DNA, 25 bp, Homo sapiens
gtggattacctggtctcgagaccag

SEQ ID NO: 22741 - DNA, 25 bp, Homo sapiens
tcatttcttctcaattcacagtgcc

SEQ ID NO: 22742 - DNA, 25 bp, Homo sapiens
ttctggggtggaactaggtcctgag

SEQ ID NO: 22743 - DNA, 25 bp, Homo sapiens
ttcttgcttcaaagagccttgggct

SEQ ID NO: 22744 - DNA, 25 bp, Homo sapiens
acaaagcctatatgacaagtctcta

SEQ ID NO: 22745 - DNA, 25 bp, Homo sapiens
attttctgttctaagatcccttcat

SEQ ID NO: 22746 - DNA, 25 bp, Homo sapiens
gaattggagtgggaaacagcttttt

SEQ ID NO: 22747 - DNA, 25 bp, Homo sapiens
gaggagtggtcatttttcccagtgt

SEQ ID NO: 22748 - DNA, 25 bp, Homo sapiens
gagttgcataagttaaggcactttc

SEQ ID NO: 22749 - DNA, 25 bp, Homo sapiens
gctatgtgtcgctaaaactgcattt

SEQ ID NO: 22750 - DNA, 25 bp, Homo sapiens
gctttttcatcatatacattatttc

SEQ ID NO: 22751 - DNA, 25 bp, Homo sapiens
ggaaatatttccagctatgtgtcgc

SEQ ID NO: 22752 - DNA, 25 bp, Homo sapiens
ggcaaagtgatcgtccaaactcaaa

SEQ ID NO: 22753 - DNA, 25 bp, Homo sapiens
gtcatttttcccagtgtagatcaca

SEQ ID NO: 22754 - DNA, 25 bp, Homo sapiens
tgaaatctactttatactctccttt

SEQ ID NO: 22755 - DNA, 25 bp, Homo sapiens
aatattttctcactcatattcctct

SEQ ID NO: 22756 - DNA, 25 bp, Homo sapiens
actatacctaccatttattcagctg

SEQ ID NO: 22757 - DNA, 25 bp, Homo sapiens
actcatattcctctatcttatcact

SEQ ID NO: 22758 - DNA, 25 bp, Homo sapiens
atattcttcctattaacaaattatt

SEQ ID NO: 22759 - DNA, 25 bp, Homo sapiens
atctcctgaacaatattttctcact

SEQ ID NO: 22760 - DNA, 25 bp, Homo sapiens
gcccttaatctattttcagtcttct

SEQ ID NO: 22761 - DNA, 25 bp, Homo sapiens
tcagtcttctggcacgtaatttttt

SEQ ID NO: 22762 - DNA, 25 bp, Homo sapiens
tggcacgtaatttttttcacagctt

SEQ ID NO: 22763 - DNA, 25 bp, Homo sapiens
ttatcttgcctagtacatttttcac

SEQ ID NO: 22764 - DNA, 25 bp, Homo sapiens
ttttcacagcttatattcttcctat

SEQ ID NO: 22765 - DNA, 25 bp, Homo sapiens
ttttcgattatcagagtacttagta

SEQ ID NO: 22766 - DNA, 25 bp, Homo sapiens
aaagtcatacggctgtcttgctact

SEQ ID NO: 22767 - DNA, 25 bp, Homo sapiens
acctttgtgccgatgcttcacaggt

SEQ ID NO: 22768 - DNA, 25 bp, Homo sapiens
agcttgtacaaaatctctcactgca

SEQ ID NO: 22769 - DNA, 25 bp, Homo sapiens
atcaaccatttcttccagcttgtat

SEQ ID NO: 22770 - DNA, 25 bp, Homo sapiens
caattaccctgtttctgattactac

SEQ ID NO: 22771 - DNA, 25 bp, Homo sapiens
cctcttggttcgtcagcttgtacaa

SEQ ID NO: 22772 - DNA, 25 bp, Homo sapiens
gaatctctccctgttattcagaaca

SEQ ID NO: 22773 - DNA, 25 bp, Homo sapiens
ggaattgtgttgatcctcttggttc

SEQ ID NO: 22774 - DNA, 25 bp, Homo sapiens
ggtttctgggattaccctgagtctc

SEQ ID NO: 22775 - DNA, 25 bp, Homo sapiens
tacacatctgttggcatctgcgcta

SEQ ID NO: 22776 - DNA, 25 bp, Homo sapiens
ttcttcctgtgttacaattaccctg

SEQ ID NO: 22777 - DNA, 25 bp, Homo sapiens
aaagatgtgatgcttctcagaacct

SEQ ID NO: 22778 - DNA, 25 bp, Homo sapiens
agaaaccacacgattgttccactgt

SEQ ID NO: 22779 - DNA, 25 bp, Homo sapiens
agacgtgctaagtagatctctgtat

SEQ ID NO: 22780 - DNA, 25 bp, Homo sapiens
atcatggcatgattcactttctcaa

SEQ ID NO: 22781 - DNA, 25 bp, Homo sapiens
catctgtatgccattgttcatgcct

SEQ ID NO: 22782 - DNA, 25 bp, Homo sapiens
cggtcagtgcagacttcaagtgtgt

SEQ ID NO: 22783 - DNA, 25 bp, Homo sapiens
gccacaagcagtcggtcagtgcaga

SEQ ID NO: 22784 - DNA, 25 bp, Homo sapiens
gtgaacaacacgtgctttactctga

SEQ ID NO: 22785 - DNA, 25 bp, Homo sapiens
gtgattgtgctggccttgtcgaaaa

SEQ ID NO: 22786 - DNA, 25 bp, Homo sapiens
gttccactgtctggaagcaccatcc

SEQ ID NO: 22787 - DNA, 25 bp, Homo sapiens
tctcagaacctgttccatctgtatg

SEQ ID NO: 22788 - DNA, 25 bp, Homo sapiens
aaagatgagtcttggaatttctctc

SEQ ID NO: 22789 - DNA, 25 bp, Homo sapiens
aaccttcaagaccagatccggcatt

SEQ ID NO: 22790 - DNA, 25 bp, Homo sapiens
ccagatccggcattggttcatcgaa

SEQ ID NO: 22791 - DNA, 25 bp, Homo sapiens
ccggcattggttcatcgaatgcaga

SEQ ID NO: 22792 - DNA, 25 bp, Homo sapiens
ctctcaggactatgatccagaactg

SEQ ID NO: 22793 - DNA, 25 bp, Homo sapiens
gaatgcagaaatttaaccgggacat

SEQ ID NO: 22794 - DNA, 25 bp, Homo sapiens
gaattacagtcagagatcaggatac

SEQ ID NO: 22795 - DNA, 25 bp, Homo sapiens
gaggatatcatagcaaaccaagagg

SEQ ID NO: 22796 - DNA, 25 bp, Homo sapiens
ggaatttctctcaggactatgatcc

SEQ ID NO: 22797 - DNA, 25 bp, Homo sapiens
ggcgtggatatcaaggagaaccttc

SEQ ID NO: 22798 - DNA, 25 bp, Homo sapiens
ttttctgacaagaccatacaacagg

SEQ ID NO: 22799 - DNA, 25 bp, Homo sapiens
aaatgaggattgctccgaggcctgc

SEQ ID NO: 22800 - DNA, 25 bp, Homo sapiens
aatagtcttttagctgggcttctcc

SEQ ID NO: 22801 - DNA, 25 bp, Homo sapiens
agctctgggagaggtctcttcctat

SEQ ID NO: 22802 - DNA, 25 bp, Homo sapiens
atatagagacattaacccttcccct

SEQ ID NO: 22803 - DNA, 25 bp, Homo sapiens
cctttcttgcagcctacaacgaata

SEQ ID NO: 22804 - DNA, 25 bp, Homo sapiens
ctcatacagataggagcccatggct

SEQ ID NO: 22805 - DNA, 25 bp, Homo sapiens
ggtagcttgaatcaccaggaccctt

SEQ ID NO: 22806 - DNA, 25 bp, Homo sapiens
tccaagccccacaggttctgaggga

SEQ ID NO: 22807 - DNA, 25 bp, Homo sapiens
tcctgcaattccacctaatgccatc

SEQ ID NO: 22808 - DNA, 25 bp, Homo sapiens
tgagggagtactagggccagctctg

SEQ ID NO: 22809 - DNA, 25 bp, Homo sapiens
tgctggtcatctgcattcctgcagg

SEQ ID NO: 22810 - DNA, 25 bp, Homo sapiens
aaaggagcatgcttgggcgttgtgg

SEQ ID NO: 22811 - DNA, 25 bp, Homo sapiens
acagcagtgatcatgacttctcctt

SEQ ID NO: 22812 - DNA, 25 bp, Homo sapiens
ccggcttgcctttacagtgaactgt

SEQ ID NO: 22813 - DNA, 25 bp, Homo sapiens
gagttttgggtccttctgaattaat

SEQ ID NO: 22814 - DNA, 25 bp, Homo sapiens
gcctatgccgagcgcgctaagaagt

SEQ ID NO: 22815 - DNA, 25 bp, Homo sapiens
gcctgtttcaagtgccatgtggacc

SEQ ID NO: 22816 - DNA, 25 bp, Homo sapiens
ggtgcagctgggaagcttgggactc

SEQ ID NO: 22817 - DNA, 25 bp, Homo sapiens
gtgaactgtgattctctcgaagcca

SEQ ID NO: 22818 - DNA, 25 bp, Homo sapiens
tctccaccaccagcgtaactggcaa

SEQ ID NO: 22819 - DNA, 25 bp, Homo sapiens
tgaattaatggtccttttcgaacac

SEQ ID NO: 22820 - DNA, 25 bp, Homo sapiens
tttcgaacaccggcttgcctttaca

SEQ ID NO: 22821 - DNA, 25 bp, Homo sapiens
acgtgccaatgtactcacttgacct

SEQ ID NO: 22822 - DNA, 25 bp, Homo sapiens
caaacctgagccagcctcattgtgt

SEQ ID NO: 22823 - DNA, 25 bp, Homo sapiens
ctgatcatcgaggctttgttttgga

SEQ ID NO: 22824 - DNA, 25 bp, Homo sapiens
gaaactcaagacatcgtgacgtgcc

SEQ ID NO: 22825 - DNA, 25 bp, Homo sapiens
gatgcaggctgccacctagtgaatg

SEQ ID NO: 22826 - DNA, 25 bp, Homo sapiens
ggaagtctcattttatgcctgatca

SEQ ID NO: 22827 - DNA, 25 bp, Homo sapiens
ggacctgtgatatccacggttattc

SEQ ID NO: 22828 - DNA, 25 bp, Homo sapiens
ggatcacctatgtgggactgggtat

SEQ ID NO: 22829 - DNA, 25 bp, Homo sapiens
tgacctccttctccatattgatgtc

SEQ ID NO: 22830 - DNA, 25 bp, Homo sapiens
tgggatttcagtcatttgcagtgga

SEQ ID NO: 22831 - DNA, 25 bp, Homo sapiens
ttgcatggtgaacatagccctgtcc

SEQ ID NO: 22832 - DNA, 25 bp, Homo sapiens
acatgagcattcacaggtcaccttc

SEQ ID NO: 22833 - DNA, 25 bp, Homo sapiens
acccatggcttaaggtacatgagca

SEQ ID NO: 22834 - DNA, 25 bp, Homo sapiens
actttgtctgaacacttccagtgac

SEQ ID NO: 22835 - DNA, 25 bp, Homo sapiens
cataccatttgagtgtcatgcagct

SEQ ID NO: 22836 - DNA, 25 bp, Homo sapiens
ccagtgacaggaatgcgttgctcta

SEQ ID NO: 22837 - DNA, 25 bp, Homo sapiens
ctgttcctgcacatcatctgtgaac

SEQ ID NO: 22838 - DNA, 25 bp, Homo sapiens
cttttttctctgccaacatgtgttc

SEQ ID NO: 22839 - DNA, 25 bp, Homo sapiens
tatcaggggaaggcctcttttttct

SEQ ID NO: 22840 - DNA, 25 bp, Homo sapiens
tatgagatggtcctttttacctttt

SEQ ID NO: 22841 - DNA, 25 bp, Homo sapiens
tcaccttctacactttgtctgaaca

SEQ ID NO: 22842 - DNA, 25 bp, Homo sapiens
ttcttttttctgagcagttttcatt

SEQ ID NO: 22843 - DNA, 25 bp, Homo sapiens
aaggcagtggagccatatctctgaa

SEQ ID NO: 22844 - DNA, 25 bp, Homo sapiens
aggatcactgtttatgaagcactga

SEQ ID NO: 22845 - DNA, 25 bp, Homo sapiens
agtgccaaagacctagtacgtcgca

SEQ ID NO: 22846 - DNA, 25 bp, Homo sapiens
cgcatgctgatgctggatccagctg

SEQ ID NO: 22847 - DNA, 25 bp, Homo sapiens
gacctagtacgtcgcatgctgatgc

SEQ ID NO: 22848 - DNA, 25 bp, Homo sapiens
gagccatatctctgaaagtgccaaa

SEQ ID NO: 22849 - DNA, 25 bp, Homo sapiens
gatgaatccaaggcagtggagccat

SEQ ID NO: 22850 - DNA, 25 bp, Homo sapiens
gcactgaatcacccatggcttaagg

SEQ ID NO: 22851 - DNA, 25 bp, Homo sapiens
gctggatccagctgaaaggatcact

SEQ ID NO: 22852 - DNA, 25 bp, Homo sapiens
gtacgtcgcatgctgatgctggatc

SEQ ID NO: 22853 - DNA, 25 bp, Homo sapiens
tatgaagcactgaatcacccatggc

SEQ ID NO: 22854 - DNA, 25 bp, Homo sapiens
acgagtatggctcgtgtacctgcca

SEQ ID NO: 22855 - DNA, 25 bp, Homo sapiens
atgcgaggtgtgattgtcccagtgg

SEQ ID NO: 22856 - DNA, 25 bp, Homo sapiens
caaaccgaaccacattgagggagcc

SEQ ID NO: 22857 - DNA, 25 bp, Homo sapiens
caacccatgcgctaccaaatacgcc

SEQ ID NO: 22858 - DNA, 25 bp, Homo sapiens
caaccttcaggacagtctatcttaa

SEQ ID NO: 22859 - DNA, 25 bp, Homo sapiens
ctaccaaatacgcctgggcagccgg

SEQ ID NO: 22860 - DNA, 25 bp, Homo sapiens
gaagatctgtccatattcaggaatc

SEQ ID NO: 22861 - DNA, 25 bp, Homo sapiens
gcagcccgcgagggaatgcgaggtg

SEQ ID NO: 22862 - DNA, 25 bp, Homo sapiens
ggatctctcccagagacttgacatt

SEQ ID NO: 22863 - DNA, 25 bp, Homo sapiens
gtctgcccaggaatactacgttgat

SEQ ID NO: 22864 - DNA, 25 bp, Homo sapiens
ttgagggagccctggtgatcatcaa

SEQ ID NO: 22865 - DNA, 25 bp, Homo sapiens
aaggttccagatatgtcttgagagg

SEQ ID NO: 22866 - DNA, 25 bp, Homo sapiens
aattactttacatgtatttgggctg

SEQ ID NO: 22867 - DNA, 25 bp, Homo sapiens
cttgagaggggttgttgcagctgca

SEQ ID NO: 22868 - DNA, 25 bp, Homo sapiens
gaagattgtgcttggaaattacttt

SEQ ID NO: 22869 - DNA, 25 bp, Homo sapiens
gacacacacatgctaaaatatcaag

SEQ ID NO: 22870 - DNA, 25 bp, Homo sapiens
gagatgtctggtacctagtttaaaa

SEQ ID NO: 22871 - DNA, 25 bp, Homo sapiens
gatgcatgtgcagtttgttctattt

SEQ ID NO: 22872 - DNA, 25 bp, Homo sapiens
ggtgttgcagagatgtctggtacct

SEQ ID NO: 22873 - DNA, 25 bp, Homo sapiens
taatttgtatctactgaggacttag

SEQ ID NO: 22874 - DNA, 25 bp, Homo sapiens
tgtagacttgggcagttcctttggg

SEQ ID NO: 22875 - DNA, 25 bp, Homo sapiens
ttgggctgtatgtcaatttgtacga

SEQ ID NO: 22876 - DNA, 25 bp, Homo sapiens
agaggcttccgaaaccttcaagata

SEQ ID NO: 22877 - DNA, 25 bp, Homo sapiens
atgtactcaagccctttatttaact

SEQ ID NO: 22878 - DNA, 25 bp, Homo sapiens
gattctgtacataccattgttatta

SEQ ID NO: 22879 - DNA, 25 bp, Homo sapiens
gcaattgcactcagcgtggtatggt

SEQ ID NO: 22880 - DNA, 25 bp, Homo sapiens
gggccccagcgtgaagccagggccc

SEQ ID NO: 22881 - DNA, 25 bp, Homo sapiens
gggcccgggaagcaaatgcgagcct

SEQ ID NO: 22882 - DNA, 25 bp, Homo sapiens
gttgtagatacggtagggttcctag

SEQ ID NO: 22883 - DNA, 25 bp, Homo sapiens
taccacttttccttgctatctagtg

SEQ ID NO: 22884 - DNA, 25 bp, Homo sapiens
tcctcccgtagattcttactgtgtt

SEQ ID NO: 22885 - DNA, 25 bp, Homo sapiens
ttctcttctttatcatacaccaacc

SEQ ID NO: 22886 - DNA, 25 bp, Homo sapiens
ttttggcgctcgaagttgatctccc

SEQ ID NO: 22887 - DNA, 25 bp, Homo sapiens
acggatttcatatttctacccgcct

SEQ ID NO: 22888 - DNA, 25 bp, Homo sapiens
ctctctcaactctgtgacctgataa

SEQ ID NO: 22889 - DNA, 25 bp, Homo sapiens
ctggaccgtctatgttttttcagcc

SEQ ID NO: 22890 - DNA, 25 bp, Homo sapiens
gctgcacttggcaataagctcgtgt

SEQ ID NO: 22891 - DNA, 25 bp, Homo sapiens
ggcagagggcttttgtagggggtcg

SEQ ID NO: 22892 - DNA, 25 bp, Homo sapiens
gtattcctgaggacggactggaccg

SEQ ID NO: 22893 - DNA, 25 bp, Homo sapiens
taagctcgtgtcgtctgtcagagcc

SEQ ID NO: 22894 - DNA, 25 bp, Homo sapiens
tattttccacgtattcctgaggacg

SEQ ID NO: 22895 - DNA, 25 bp, Homo sapiens
tcagcccttcatagggggtctttta

SEQ ID NO: 22896 - DNA, 25 bp, Homo sapiens
tcttcccgtcacaatcaactttgga

SEQ ID NO: 22897 - DNA, 25 bp, Homo sapiens
tttcctgactctgtgttttatatat

SEQ ID NO: 22898 - DNA, 25 bp, Homo sapiens
aactcagcatgtaacaaccaattta

SEQ ID NO: 22899 - DNA, 25 bp, Homo sapiens
ataattctttgtactaactcagcat

SEQ ID NO: 22900 - DNA, 25 bp, Homo sapiens
ataccctgtatggataatgcttgac

SEQ ID NO: 22901 - DNA, 25 bp, Homo sapiens
attaatgtgttaataccctgtatgg

SEQ ID NO: 22902 - DNA, 25 bp, Homo sapiens
gagttaagtggtactttcacaatcc

SEQ ID NO: 22903 - DNA, 25 bp, Homo sapiens
ggcaatgagtttgtggccagatttc

SEQ ID NO: 22904 - DNA, 25 bp, Homo sapiens
gtagtctaatatgctgcagttattt

SEQ ID NO: 22905 - DNA, 25 bp, Homo sapiens
gtggccagatttcaaatagggagtt

SEQ ID NO: 22906 - DNA, 25 bp, Homo sapiens
gttgaacatacattatgccttagaa

SEQ ID NO: 22907 - DNA, 25 bp, Homo sapiens
ttatttgacagatctctattctata

SEQ ID NO: 22908 - DNA, 25 bp, Homo sapiens
ttgacatttagtggtttccaaaata

SEQ ID NO: 22909 - DNA, 25 bp, Homo sapiens
aagaatttttacagagccaggggca

SEQ ID NO: 22910 - DNA, 25 bp, Homo sapiens
ctttctgccagatcactagacttaa

SEQ ID NO: 22911 - DNA, 25 bp, Homo sapiens
gaaaaatagccttagatccctcata

SEQ ID NO: 22912 - DNA, 25 bp, Homo sapiens
gagagggagtctcatgatgcctgag

SEQ ID NO: 22913 - DNA, 25 bp, Homo sapiens
gatacttttgaccctataacatatt

SEQ ID NO: 22914 - DNA, 25 bp, Homo sapiens
gccaggggcagtaatcatccgacct

SEQ ID NO: 22915 - DNA, 25 bp, Homo sapiens
ggtgttcacgttacagttacattac

SEQ ID NO: 22916 - DNA, 25 bp, Homo sapiens
tatccctattgaattctttctgcca

SEQ ID NO: 22917 - DNA, 25 bp, Homo sapiens
tctggccattagtggtgttcacgtt

SEQ ID NO: 22918 - DNA, 25 bp, Homo sapiens
tgcctgagataatttctggccatta

SEQ ID NO: 22919 - DNA, 25 bp, Homo sapiens
tgtaaaaatgtcccaccagcaagct

SEQ ID NO: 22920 - DNA, 25 bp, Homo sapiens
aaattgaactcagagatcccgatcc

SEQ ID NO: 22921 - DNA, 25 bp, Homo sapiens
aaccttagtttctaccagagagtgt

SEQ ID NO: 22922 - DNA, 25 bp, Homo sapiens
ataattccatctgctgttcttcata

SEQ ID NO: 22923 - DNA, 25 bp, Homo sapiens
gaaaccacttctggtggaagcccct

SEQ ID NO: 22924 - DNA, 25 bp, Homo sapiens
gaaagttttccttgtatcgagctca

SEQ ID NO: 22925 - DNA, 25 bp, Homo sapiens
gacttgccttttctctaggtcaaat

SEQ ID NO: 22926 - DNA, 25 bp, Homo sapiens
gcctaacaatcaaatctctttcttt

SEQ ID NO: 22927 - DNA, 25 bp, Homo sapiens
gtaccagctctgctgtcagagactt

SEQ ID NO: 22928 - DNA, 25 bp, Homo sapiens
tcttcatagggtcttctccctatcc

SEQ ID NO: 22929 - DNA, 25 bp, Homo sapiens
tgccctgtgacgtcttcagactatt

SEQ ID NO: 22930 - DNA, 25 bp, Homo sapiens
tgtatcgagctcaaatctgcctcct

SEQ ID NO: 22931 - DNA, 25 bp, Homo sapiens
agggccatggccaaaaggctcctga

SEQ ID NO: 22932 - DNA, 25 bp, Homo sapiens
ccccagcctgtagaggactttcttc

SEQ ID NO: 22933 - DNA, 25 bp, Homo sapiens
ccgcgggcacatttgccttttgtga

SEQ ID NO: 22934 - DNA, 25 bp, Homo sapiens
cgcccggggttctatgatatttgta

SEQ ID NO: 22935 - DNA, 25 bp, Homo sapiens
ctgctccgaagccgccataataaaa

SEQ ID NO: 22936 - DNA, 25 bp, Homo sapiens
gaactcgagctgtatcctcatagga

SEQ ID NO: 22937 - DNA, 25 bp, Homo sapiens
gtgaaggccgaactcgagctgtatc

SEQ ID NO: 22938 - DNA, 25 bp, Homo sapiens
tgaactctcagtcacgtggaagcca

SEQ ID NO: 22939 - DNA, 25 bp, Homo sapiens
tgatatttgtagtgccggggctcgc

SEQ ID NO: 22940 - DNA, 25 bp, Homo sapiens
tgcctccactatgatccttaaagga

SEQ ID NO: 22941 - DNA, 25 bp, Homo sapiens
tgtgggcacgactttgtactcagaa

SEQ ID NO: 22942 - DNA, 25 bp, Homo sapiens
aagaacaatgacacagcttgagcgt

SEQ ID NO: 22943 - DNA, 25 bp, Homo sapiens
aatccttgcctatgtacgtcacagg

SEQ ID NO: 22944 - DNA, 25 bp, Homo sapiens
agagcacaataatccttgcctatgt

SEQ ID NO: 22945 - DNA, 25 bp, Homo sapiens
gaaaaagactgcaagctttcctgcc

SEQ ID NO: 22946 - DNA, 25 bp, Homo sapiens
gcaagctttcctgccaatttgggat

SEQ ID NO: 22947 - DNA, 25 bp, Homo sapiens
ggcagaggcaaaagtttcacacaaa

SEQ ID NO: 22948 - DNA, 25 bp, Homo sapiens
gtttctgcaacctaacgtttaatag

SEQ ID NO: 22949 - DNA, 25 bp, Homo sapiens
tcctcacttctgagtttcatcctat

SEQ ID NO: 22950 - DNA, 25 bp, Homo sapiens
tgtttaaaattggctctgactcctc

SEQ ID NO: 22951 - DNA, 25 bp, Homo sapiens
ttcctccttcgtgtcattgtgatat

SEQ ID NO: 22952 - DNA, 25 bp, Homo sapiens
ttctgagtttcatcctatccgaggg

SEQ ID NO: 22953 - DNA, 25 bp, Homo sapiens
aaaccacttcagctatcttttttat

SEQ ID NO: 22954 - DNA, 25 bp, Homo sapiens
atagccctgatgtctaaaccacttc

SEQ ID NO: 22955 - DNA, 25 bp, Homo sapiens
atcaagcagagttttatcaccttat

SEQ ID NO: 22956 - DNA, 25 bp, Homo sapiens
gataatatattcctattttccccct

SEQ ID NO: 22957 - DNA, 25 bp, Homo sapiens
gatattgccatgtcacaagtccagg

SEQ ID NO: 22958 - DNA, 25 bp, Homo sapiens
gcctggccttccatatatcaagcag

SEQ ID NO: 22959 - DNA, 25 bp, Homo sapiens
gtgtccttccagagtgtctttatgc

SEQ ID NO: 22960 - DNA, 25 bp, Homo sapiens
tagactaccataatcccattctgca

SEQ ID NO: 22961 - DNA, 25 bp, Homo sapiens
tgccacctgccataaagttgatagg

SEQ ID NO: 22962 - DNA, 25 bp, Homo sapiens
tggtctcaccgttgtgcttagggga

SEQ ID NO: 22963 - DNA, 25 bp, Homo sapiens
ttatcaccttatgcaggggcagccc

SEQ ID NO: 22964 - DNA, 25 bp, Homo sapiens
aaaatgatacttagacagaattgtc

SEQ ID NO: 22965 - DNA, 25 bp, Homo sapiens
aaacacatgtcccagactgcatact

SEQ ID NO: 22966 - DNA, 25 bp, Homo sapiens
atactggggtcgtcatgaggtgtct

SEQ ID NO: 22967 - DNA, 25 bp, Homo sapiens
atgtgaccctacccataaaaaatga

SEQ ID NO: 22968 - DNA, 25 bp, Homo sapiens
attcaagaacatttaggctatagga

SEQ ID NO: 22969 - DNA, 25 bp, Homo sapiens
gactgcatactggggtcgtcatgag

SEQ ID NO: 22970 - DNA, 25 bp, Homo sapiens
gcccacaatgatattacaaacctat

SEQ ID NO: 22971 - DNA, 25 bp, Homo sapiens
ggccagcccacaatgatattacaaa

SEQ ID NO: 22972 - DNA, 25 bp, Homo sapiens
tatatatgtatgtgaccctacccat

SEQ ID NO: 22973 - DNA, 25 bp, Homo sapiens
tatgtatgtgaccctacccataaaa

SEQ ID NO: 22974 - DNA, 25 bp, Homo sapiens
tctgtgtacttttccttgaatgtgc

SEQ ID NO: 22975 - DNA, 25 bp, Homo sapiens
agtctgctttgagcagtgctgcccc

SEQ ID NO: 22976 - DNA, 25 bp, Homo sapiens
ataaaccagaactgcgactcagccc

SEQ ID NO: 22977 - DNA, 25 bp, Homo sapiens
caggctttgtcgcagtgtcagctaa

SEQ ID NO: 22978 - DNA, 25 bp, Homo sapiens
cccttctgtgagattttccatcatc

SEQ ID NO: 22979 - DNA, 25 bp, Homo sapiens
gaaactgcaccttcagagtctgctt

SEQ ID NO: 22980 - DNA, 25 bp, Homo sapiens
gaacgatgactcctggattctcctt

SEQ ID NO: 22981 - DNA, 25 bp, Homo sapiens
gaggctggtgttacctgagatctgg

SEQ ID NO: 22982 - DNA, 25 bp, Homo sapiens
gatctgggatgctgagtggctgttt

SEQ ID NO: 22983 - DNA, 25 bp, Homo sapiens
ggccaggacccagacgtgtggaaac

SEQ ID NO: 22984 - DNA, 25 bp, Homo sapiens
tgatgacccctatggccaacatcaa

SEQ ID NO: 22985 - DNA, 25 bp, Homo sapiens
ttccatcatctcaagttctcttcta

SEQ ID NO: 22986 - DNA, 25 bp, Homo sapiens
gatgtaccaaccactgggatctctc

SEQ ID NO: 22987 - DNA, 25 bp, Homo sapiens
gcacttaccatattctgccttgtat

SEQ ID NO: 22988 - DNA, 25 bp, Homo sapiens
gcacttgtcctttgactgttcttag

SEQ ID NO: 22989 - DNA, 25 bp, Homo sapiens
ggaaagggtgcctgcgttttactgt

SEQ ID NO: 22990 - DNA, 25 bp, Homo sapiens
ggcgtggtgcatagcacacagcagt

SEQ ID NO: 22991 - DNA, 25 bp, Homo sapiens
gtatccatcacagcactaggcgtgg

SEQ ID NO: 22992 - DNA, 25 bp, Homo sapiens
gtgttttattcatctgtatccatca

SEQ ID NO: 22993 - DNA, 25 bp, Homo sapiens
gttatttgtgcacttgtcctttgac

SEQ ID NO: 22994 - DNA, 25 bp, Homo sapiens
tacctttctcatggcacttaccata

SEQ ID NO: 22995 - DNA, 25 bp, Homo sapiens
tagcactttatttgtacctttctca

SEQ ID NO: 22996 - DNA, 25 bp, Homo sapiens
tctgctgaaccaccgtagcacttta

SEQ ID NO: 22997 - DNA, 25 bp, Homo sapiens
aaacaccttaagaactgctcagggt

SEQ ID NO: 22998 - DNA, 25 bp, Homo sapiens
aggctatactcaacacacgtgcaat

SEQ ID NO: 22999 - DNA, 25 bp, Homo sapiens
agtataacctaagcctcttttctct

SEQ ID NO: 23000 - DNA, 25 bp, Homo sapiens
atcaaagcttcttcccatttgtact

SEQ ID NO: 23001 - DNA, 25 bp, Homo sapiens
ccatttgtacttcagttctaggaca

SEQ ID NO: 23002 - DNA, 25 bp, Homo sapiens
gaactgctcagggtagactggagac

SEQ ID NO: 23003 - DNA, 25 bp, Homo sapiens
gatttatgggtaggtgggtcggtag

SEQ ID NO: 23004 - DNA, 25 bp, Homo sapiens
gcaggcgaggcaaaaccagggcaga

SEQ ID NO: 23005 - DNA, 25 bp, Homo sapiens
gtgggtcggtaggttagttgaagag

SEQ ID NO: 23006 - DNA, 25 bp, Homo sapiens
tctcaatttcaccctcagttcaagg

SEQ ID NO: 23007 - DNA, 25 bp, Homo sapiens
ttcttctgcttcaaacaccttaaga

SEQ ID NO: 23008 - DNA, 25 bp, Homo sapiens
aaacatatgtttgcataggcacaga

SEQ ID NO: 23009 - DNA, 25 bp, Homo sapiens
aatgttagcaggaagggtgtgtggg

SEQ ID NO: 23010 - DNA, 25 bp, Homo sapiens
accatttcaaacaggtattcaataa

SEQ ID NO: 23011 - DNA, 25 bp, Homo sapiens
atcaactatgggcccagtatgcagc

SEQ ID NO: 23012 - DNA, 25 bp, Homo sapiens
cagaaaaccagttctatcaactatg

SEQ ID NO: 23013 - DNA, 25 bp, Homo sapiens
cttgcctggcctgcaaaatttgttt

SEQ ID NO: 23014 - DNA, 25 bp, Homo sapiens
gagtaactctagatttgagctgttc

SEQ ID NO: 23015 - DNA, 25 bp, Homo sapiens
gatttgagctgttcagtagccatta

SEQ ID NO: 23016 - DNA, 25 bp, Homo sapiens
gcataggcacagaatgtatcatttc

SEQ ID NO: 23017 - DNA, 25 bp, Homo sapiens
tatacattgatatgagaccatttca

SEQ ID NO: 23018 - DNA, 25 bp, Homo sapiens
tgaggggaactgtgaagctatggaa

SEQ ID NO: 23019 - DNA, 25 bp, Homo sapiens
aagcaggtgatggccaaacacccca

SEQ ID NO: 23020 - DNA, 25 bp, Homo sapiens
cagtggtgctgttgtggtggctgga

SEQ ID NO: 23021 - DNA, 25 bp, Homo sapiens
catattcttttatgcctacttcgcc

SEQ ID NO: 23022 - DNA, 25 bp, Homo sapiens
cccagaaacacgccttctgggcccg

SEQ ID NO: 23023 - DNA, 25 bp, Homo sapiens
cccccacagagtgtccagattgaga

SEQ ID NO: 23024 - DNA, 25 bp, Homo sapiens
gctcaggatgtgcccttgggaacta

SEQ ID NO: 23025 - DNA, 25 bp, Homo sapiens
ggccaagccagcaaagcgggagccc

SEQ ID NO: 23026 - DNA, 25 bp, Homo sapiens
gtgacatttcaaaaacagcaccaaa

SEQ ID NO: 23027 - DNA, 25 bp, Homo sapiens
gtgcccttgggaactaaagcaggtg

SEQ ID NO: 23028 - DNA, 25 bp, Homo sapiens
gtgtctgtggcttcaatgccatcct

SEQ ID NO: 23029 - DNA, 25 bp, Homo sapiens
ttgagaaccttacctggtggaccct

SEQ ID NO: 23030 - DNA, 25 bp, Homo sapiens
aaaagactactatatcacaattaaa

SEQ ID NO: 23031 - DNA, 25 bp, Homo sapiens
gaccataacaaccttgaaagctgct

SEQ ID NO: 23032 - DNA, 25 bp, Homo sapiens
gatcgtgaatgtacttactggtttt

SEQ ID NO: 23033 - DNA, 25 bp, Homo sapiens
gcagtgtatagcagagccatttttc

SEQ ID NO: 23034 - DNA, 25 bp, Homo sapiens
gccatttttcggctttggtgtactc

SEQ ID NO: 23035 - DNA, 25 bp, Homo sapiens
ggctttggtgtactcaactttttca

SEQ ID NO: 23036 - DNA, 25 bp, Homo sapiens
ggtgtactcaactttttcagtattt

SEQ ID NO: 23037 - DNA, 25 bp, Homo sapiens
gttttattttatgtactgacactaa

SEQ ID NO: 23038 - DNA, 25 bp, Homo sapiens
tactgtcagttaatttgcaaatgca

SEQ ID NO: 23039 - DNA, 25 bp, Homo sapiens
ttgaagatgctttctgtacagatac

SEQ ID NO: 23040 - DNA, 25 bp, Homo sapiens
ttgcaaatgcaagctgtattctcca

SEQ ID NO: 23041 - DNA, 25 bp, Homo sapiens
acgtgtgtgttcacagacaatacaa

SEQ ID NO: 23042 - DNA, 25 bp, Homo sapiens
atatgtgtgcgcctgcatggatgtg

SEQ ID NO: 23043 - DNA, 25 bp, Homo sapiens
gatcctaggtatgtatgttggacag

SEQ ID NO: 23044 - DNA, 25 bp, Homo sapiens
gcatatgtgtgcgcctgcatggatg

SEQ ID NO: 23045 - DNA, 25 bp, Homo sapiens
gcatgcacatgatcctaggtatgta

SEQ ID NO: 23046 - DNA, 25 bp, Homo sapiens
gcgcctgcatggatgtgaggggtgt

SEQ ID NO: 23047 - DNA, 25 bp, Homo sapiens
gtgtgcatgcacatgatcctaggta

SEQ ID NO: 23048 - DNA, 25 bp, Homo sapiens
gtgtgcgcatatgtgtgcgcctgca

SEQ ID NO: 23049 - DNA, 25 bp, Homo sapiens
gtgtgcgcctgcatggatgtgaggg

SEQ ID NO: 23050 - DNA, 25 bp, Homo sapiens
tattgaaattcaggcttggagtggc

SEQ ID NO: 23051 - DNA, 25 bp, Homo sapiens
tcacagacaatacaacatgccctct

SEQ ID NO: 23052 - DNA, 25 bp, Homo sapiens
cagctggtgacgcagaacaggccct

SEQ ID NO: 23053 - DNA, 25 bp, Homo sapiens
ccatgtcactcaacacactgaacgt

SEQ ID NO: 23054 - DNA, 25 bp, Homo sapiens
gatccgtgagtctatcaggcgagga

SEQ ID NO: 23055 - DNA, 25 bp, Homo sapiens
gctcactctccaagatccgtgagtc

SEQ ID NO: 23056 - DNA, 25 bp, Homo sapiens
ggaagtgagaagctggtctcccggc

SEQ ID NO: 23057 - DNA, 25 bp, Homo sapiens
ggagcagccggaatgaagagagcca

SEQ ID NO: 23058 - DNA, 25 bp, Homo sapiens
gtgagagggggtctatcatctcctg

SEQ ID NO: 23059 - DNA, 25 bp, Homo sapiens
taacgtccagtgaactgcgctggcc

SEQ ID NO: 23060 - DNA, 25 bp, Homo sapiens
tgaacgtggatgctccaagggctcc

SEQ ID NO: 23061 - DNA, 25 bp, Homo sapiens
tgggtacctggtggatagctgcctt

SEQ ID NO: 23062 - DNA, 25 bp, Homo sapiens
ttgcctctgggtacctggtggatag

SEQ ID NO: 23063 - DNA, 25 bp, Homo sapiens
agagagtgttatcctcacctttttg

SEQ ID NO: 23064 - DNA, 25 bp, Homo sapiens
atcaggtgtgttgttgaggctgcta

SEQ ID NO: 23065 - DNA, 25 bp, Homo sapiens
cacctttttgcatagtcctaccaaa

SEQ ID NO: 23066 - DNA, 25 bp, Homo sapiens
ctcctctctctgatgacacatgaac

SEQ ID NO: 23067 - DNA, 25 bp, Homo sapiens
gatgtcttttttgatgtcctcttta

SEQ ID NO: 23068 - DNA, 25 bp, Homo sapiens
tagaatgccctaggtgaatccctcc

SEQ ID NO: 23069 - DNA, 25 bp, Homo sapiens
tatgcttttgcacacttcaggcaac

SEQ ID NO: 23070 - DNA, 25 bp, Homo sapiens
tcctaccaaaagacacctcacatgc

SEQ ID NO: 23071 - DNA, 25 bp, Homo sapiens
ttctcgctgcctcattggttgagat

SEQ ID NO: 23072 - DNA, 25 bp, Homo sapiens
ttgaggctgctaaaagctttccttt

SEQ ID NO: 23073 - DNA, 25 bp, Homo sapiens
ttgctgttttcccagtgggttaatc

SEQ ID NO: 23074 - DNA, 25 bp, Homo sapiens
agtctgctcagttaggtcacatgct

SEQ ID NO: 23075 - DNA, 25 bp, Homo sapiens
ccatcggctttgctgagtatgaatg

SEQ ID NO: 23076 - DNA, 25 bp, Homo sapiens
gaaggacataaatcttggtttgctc

SEQ ID NO: 23077 - DNA, 25 bp, Homo sapiens
gacgggcctggattatacttacgtt

SEQ ID NO: 23078 - DNA, 25 bp, Homo sapiens
gagaagtcaagccctctaggtgata

SEQ ID NO: 23079 - DNA, 25 bp, Homo sapiens
ggatctgaggagggctgcacagcac

SEQ ID NO: 23080 - DNA, 25 bp, Homo sapiens
gtaggcggcacaaaagtctgctcag

SEQ ID NO: 23081 - DNA, 25 bp, Homo sapiens
gtttgctcagacgggcctggattat

SEQ ID NO: 23082 - DNA, 25 bp, Homo sapiens
tatgtttagtgcccttttcatgcta

SEQ ID NO: 23083 - DNA, 25 bp, Homo sapiens
ttaggtcacatgctccagaggcact

SEQ ID NO: 23084 - DNA, 25 bp, Homo sapiens
tttcatgctaagaagtgtcctactt

SEQ ID NO: 23085 - DNA, 25 bp, Homo sapiens
aagagaggcctttcttgcatcaaac

SEQ ID NO: 23086 - DNA, 25 bp, Homo sapiens
agtagatttctaaggcatgtgctga

SEQ ID NO: 23087 - DNA, 25 bp, Homo sapiens
gagtgttcagtatctgtttgtcaag

SEQ ID NO: 23088 - DNA, 25 bp, Homo sapiens
gggtggccatatagttctctaagct

SEQ ID NO: 23089 - DNA, 25 bp, Homo sapiens
gtataatgttagatcaccctgctac

SEQ ID NO: 23090 - DNA, 25 bp, Homo sapiens
gtctcgaacagatctgtgtttgcca

SEQ ID NO: 23091 - DNA, 25 bp, Homo sapiens
tatcactttgaacatctggacagca

SEQ ID NO: 23092 - DNA, 25 bp, Homo sapiens
tatttattaggctggtgtctcgaac

SEQ ID NO: 23093 - DNA, 25 bp, Homo sapiens
tggaagtgattcttggctggagttg

SEQ ID NO: 23094 - DNA, 25 bp, Homo sapiens
ttccatctaccctagtctgctagtt

SEQ ID NO: 23095 - DNA, 25 bp, Homo sapiens
ttttttccctcttcattgatcatgt

SEQ ID NO: 23096 - DNA, 25 bp, Homo sapiens
aaacaaaagtatcccagcatcttca

SEQ ID NO: 23097 - DNA, 25 bp, Homo sapiens
aagtcaagcgcaaactgatggggag

SEQ ID NO: 23098 - DNA, 25 bp, Homo sapiens
acaatggtactgcggtcttggggga

SEQ ID NO: 23099 - DNA, 25 bp, Homo sapiens
atacgtatatactgtaatccgttac

SEQ ID NO: 23100 - DNA, 25 bp, Homo sapiens
cagtgggctctggtttccagggttg

SEQ ID NO: 23101 - DNA, 25 bp, Homo sapiens
cttcatcctgtacacttggaattaa

SEQ ID NO: 23102 - DNA, 25 bp, Homo sapiens
gaattaatttcatttgggcatatcc

SEQ ID NO: 23103 - DNA, 25 bp, Homo sapiens
gactttataacaacacacattacct

SEQ ID NO: 23104 - DNA, 25 bp, Homo sapiens
gatgacttcggttgaatagctttat

SEQ ID NO: 23105 - DNA, 25 bp, Homo sapiens
gtatgtggtacttctacagtgtaca

SEQ ID NO: 23106 - DNA, 25 bp, Homo sapiens
gtgtgtacagacaagcttcatacgt

SEQ ID NO: 23107 - DNA, 25 bp, Homo sapiens
aaaggttttgccctgagcatctggt

SEQ ID NO: 23108 - DNA, 25 bp, Homo sapiens
catatgactctccggcttggattgc

SEQ ID NO: 23109 - DNA, 25 bp, Homo sapiens
gacagtctgactactctcaaaactc

SEQ ID NO: 23110 - DNA, 25 bp, Homo sapiens
ggggacccataagacagggcttcta

SEQ ID NO: 23111 - DNA, 25 bp, Homo sapiens
ggtgaatcacttaacccgagtatta

SEQ ID NO: 23112 - DNA, 25 bp, Homo sapiens
taaagagcgcccgaagcactagcag

SEQ ID NO: 23113 - DNA, 25 bp, Homo sapiens
tagataaatgctacttcctgtgccc

SEQ ID NO: 23114 - DNA, 25 bp, Homo sapiens
tcaaaactcctcgtgacaggccttt

SEQ ID NO: 23115 - DNA, 25 bp, Homo sapiens
tgccctggggatattggttttctca

SEQ ID NO: 23116 - DNA, 25 bp, Homo sapiens
tgtgcccattctcttgggagttctc

SEQ ID NO: 23117 - DNA, 25 bp, Homo sapiens
ttccttacacttgggcctgttatca

SEQ ID NO: 23118 - DNA, 25 bp, Homo sapiens
aagggcttctgagcagactgcttct

SEQ ID NO: 23119 - DNA, 25 bp, Homo sapiens
aatctgccctactattggccacatt

SEQ ID NO: 23120 - DNA, 25 bp, Homo sapiens
atcgccccaggcacacataaataaa

SEQ ID NO: 23121 - DNA, 25 bp, Homo sapiens
cccactcttcatcatgggcatcttg

SEQ ID NO: 23122 - DNA, 25 bp, Homo sapiens
ctgccatgtctagcgtgggatgcat

SEQ ID NO: 23123 - DNA, 25 bp, Homo sapiens
gaaaggtagtgcagctctttagccc

SEQ ID NO: 23124 - DNA, 25 bp, Homo sapiens
gtaaacctcagatggccatcctagg

SEQ ID NO: 23125 - DNA, 25 bp, Homo sapiens
tagagactgcttgttgggttccatc

SEQ ID NO: 23126 - DNA, 25 bp, Homo sapiens
tggggaggagatagctgccctctcc

SEQ ID NO: 23127 - DNA, 25 bp, Homo sapiens
ttccatcctcattgctctgagactc

SEQ ID NO: 23128 - DNA, 25 bp, Homo sapiens
tttgttagaggaacacctgcccatc

SEQ ID NO: 23129 - DNA, 25 bp, Homo sapiens
cacaagttgatagctgtactcgccc

SEQ ID NO: 23130 - DNA, 25 bp, Homo sapiens
cccttttggaagacgcacgcccaag

SEQ ID NO: 23131 - DNA, 25 bp, Homo sapiens
cttcggagaaggctgcccagtgtct

SEQ ID NO: 23132 - DNA, 25 bp, Homo sapiens
gacctctgtccacacgtgtgtgttt

SEQ ID NO: 23133 - DNA, 25 bp, Homo sapiens
gcctttctcaccacatgttaggatc

SEQ ID NO: 23134 - DNA, 25 bp, Homo sapiens
ggacactgacagcttcggagaaggc

SEQ ID NO: 23135 - DNA, 25 bp, Homo sapiens
ggcacccgtgtgtgcacacgtatcc

SEQ ID NO: 23136 - DNA, 25 bp, Homo sapiens
gtgtgtacaccacgtgtgaacgcca

SEQ ID NO: 23137 - DNA, 25 bp, Homo sapiens
gtgttttgaaaagcctttctcacca

SEQ ID NO: 23138 - DNA, 25 bp, Homo sapiens
tgaacgccaactgggaacacggccc

SEQ ID NO: 23139 - DNA, 25 bp, Homo sapiens
tggatgaggcggcggaaaccacatc

SEQ ID NO: 23140 - DNA, 25 bp, Homo sapiens
aaatatttcgcattctctactgtac

SEQ ID NO: 23141 - DNA, 25 bp, Homo sapiens
accttggaggcattttgacccacga

SEQ ID NO: 23142 - DNA, 25 bp, Homo sapiens
atctataatttgattcttacgcatt

SEQ ID NO: 23143 - DNA, 25 bp, Homo sapiens
atttgcagccagtcagtggaactga

SEQ ID NO: 23144 - DNA, 25 bp, Homo sapiens
catgcagtattcttgtgcggacatt

SEQ ID NO: 23145 - DNA, 25 bp, Homo sapiens
cttacgcattttactactttcaaat

SEQ ID NO: 23146 - DNA, 25 bp, Homo sapiens
ggcattttgacccacgaagtagcat

SEQ ID NO: 23147 - DNA, 25 bp, Homo sapiens
gtagcatagatatgtgctggcttcc

SEQ ID NO: 23148 - DNA, 25 bp, Homo sapiens
tgtgcggacatttgcagccagtcag

SEQ ID NO: 23149 - DNA, 25 bp, Homo sapiens
ttactactttcaaatcacatcctct

SEQ ID NO: 23150 - DNA, 25 bp, Homo sapiens
tttcgcattctctactgtactggat

SEQ ID NO: 23151 - DNA, 25 bp, Homo sapiens
aatcgtcggatttccagcgaggcag

SEQ ID NO: 23152 - DNA, 25 bp, Homo sapiens
cagctcgatcaatcttgctgggctg

SEQ ID NO: 23153 - DNA, 25 bp, Homo sapiens
catttgagcgtgtttacttaaagac

SEQ ID NO: 23154 - DNA, 25 bp, Homo sapiens
ccattccagctcgatcaatcttgct

SEQ ID NO: 23155 - DNA, 25 bp, Homo sapiens
cggagggggagagagcgtgcctcgg

SEQ ID NO: 23156 - DNA, 25 bp, Homo sapiens
gcgcgcgcgaaatcgtcggatttcc

SEQ ID NO: 23157 - DNA, 25 bp, Homo sapiens
ggatttccagcgaggcagcaaatat

SEQ ID NO: 23158 - DNA, 25 bp, Homo sapiens
gggcggtcatttgagcgtgtttact

SEQ ID NO: 23159 - DNA, 25 bp, Homo sapiens
tcccggccgcgcagacagaaaagaa

SEQ ID NO: 23160 - DNA, 25 bp, Homo sapiens
tcctaaagttactaatcccgcggag

SEQ ID NO: 23161 - DNA, 25 bp, Homo sapiens
tttgcaagcagagcgcgcgcgaaat

SEQ ID NO: 23162 - DNA, 25 bp, Homo sapiens
aaactcagagttattgcctttcata

SEQ ID NO: 23163 - DNA, 25 bp, Homo sapiens
aacagaatctctaataacctataat

SEQ ID NO: 23164 - DNA, 25 bp, Homo sapiens
aattactatttttctgttgcactca

SEQ ID NO: 23165 - DNA, 25 bp, Homo sapiens
actatttttctgttgcactcagcaa

SEQ ID NO: 23166 - DNA, 25 bp, Homo sapiens
acttaacaaaattcttgtagtctgt

SEQ ID NO: 23167 - DNA, 25 bp, Homo sapiens
agttattgcctttcatactgctttc

SEQ ID NO: 23168 - DNA, 25 bp, Homo sapiens
attatgtgatgttttattctaggaa

SEQ ID NO: 23169 - DNA, 25 bp, Homo sapiens
cacccttcttgactgcaaagccaga

SEQ ID NO: 23170 - DNA, 25 bp, Homo sapiens
cagaatttttgcatcttttcagaaa

SEQ ID NO: 23171 - DNA, 25 bp, Homo sapiens
gcactcagcaattgtgactatactt

SEQ ID NO: 23172 - DNA, 25 bp, Homo sapiens
ggtggttttggacaattgtacacag

SEQ ID NO: 23173 - DNA, 25 bp, Homo sapiens
aaatcatttgagacggtgccctgta

SEQ ID NO: 23174 - DNA, 25 bp, Homo sapiens
aatgttcacatacacacctgcagat

SEQ ID NO: 23175 - DNA, 25 bp, Homo sapiens
atacactttcttgagcagagtctga

SEQ ID NO: 23176 - DNA, 25 bp, Homo sapiens
atgtctgtgacatctgtatccttat

SEQ ID NO: 23177 - DNA, 25 bp, Homo sapiens
cagagaaccgtgactctgggcttcc

SEQ ID NO: 23178 - DNA, 25 bp, Homo sapiens
catctcaaggcatctagctcttacc

SEQ ID NO: 23179 - DNA, 25 bp, Homo sapiens
gaaacgaacacagtcacatagtcca

SEQ ID NO: 23180 - DNA, 25 bp, Homo sapiens
gagcgtgggagagtgccctaaactt

SEQ ID NO: 23181 - DNA, 25 bp, Homo sapiens
gagggcggagcaacctgttatcaat

SEQ ID NO: 23182 - DNA, 25 bp, Homo sapiens
ggcagagtaggggtcctgattgtca

SEQ ID NO: 23183 - DNA, 25 bp, Homo sapiens
gtgccctgtatgttcatctcaaggc

SEQ ID NO: 23184 - DNA, 25 bp, Homo sapiens
aaatctggtcagccacttgtttatt

SEQ ID NO: 23185 - DNA, 25 bp, Homo sapiens
gccagtaccactactatctagatcc

SEQ ID NO: 23186 - DNA, 25 bp, Homo sapiens
gccttgcaacctggcattatgtgtt

SEQ ID NO: 23187 - DNA, 25 bp, Homo sapiens
gcgtttagcacatttgccagtacca

SEQ ID NO: 23188 - DNA, 25 bp, Homo sapiens
ggcatcgttctatagcctattgggt

SEQ ID NO: 23189 - DNA, 25 bp, Homo sapiens
ggcattatgtgttggcatcgttcta

SEQ ID NO: 23190 - DNA, 25 bp, Homo sapiens
ggctgacaaactatggtctcttggt

SEQ ID NO: 23191 - DNA, 25 bp, Homo sapiens
gtctcttggtcaaatctggtcagcc

SEQ ID NO: 23192 - DNA, 25 bp, Homo sapiens
taacatgtcctatttgtttctaaat

SEQ ID NO: 23193 - DNA, 25 bp, Homo sapiens
tagacagtcatgtcacattctccca

SEQ ID NO: 23194 - DNA, 25 bp, Homo sapiens
tgtgcattattcattggcgtttagc

SEQ ID NO: 23195 - DNA, 25 bp, Homo sapiens
aaggaatcttctaccatcgagcttt

SEQ ID NO: 23196 - DNA, 25 bp, Homo sapiens
acctgatttcagctgggaacttcac

SEQ ID NO: 23197 - DNA, 25 bp, Homo sapiens
agaattggcattggttgctccctag

SEQ ID NO: 23198 - DNA, 25 bp, Homo sapiens
agctttgcttttcaaggctctggct

SEQ ID NO: 23199 - DNA, 25 bp, Homo sapiens
cactgtgtacactctctaagacatt

SEQ ID NO: 23200 - DNA, 25 bp, Homo sapiens
cctcatgttccatccaggtggactg

SEQ ID NO: 23201 - DNA, 25 bp, Homo sapiens
gagaagtcgagaggctgatctttac

SEQ ID NO: 23202 - DNA, 25 bp, Homo sapiens
gtacgtgattgacctcatgttccat

SEQ ID NO: 23203 - DNA, 25 bp, Homo sapiens
gttgctccctagttcgcggagagta

SEQ ID NO: 23204 - DNA, 25 bp, Homo sapiens
tccccgctcctgagatgtacgtgat

SEQ ID NO: 23205 - DNA, 25 bp, Homo sapiens
tgctgcagaatgactctcggaaggg

SEQ ID NO: 23206 - DNA, 25 bp, Homo sapiens
aaaacggcaatgagctcagtaaaca

SEQ ID NO: 23207 - DNA, 25 bp, Homo sapiens
aaggcgacacggcagagaggcagaa

SEQ ID NO: 23208 - DNA, 25 bp, Homo sapiens
agtggaggggaagtttgtctggatt

SEQ ID NO: 23209 - DNA, 25 bp, Homo sapiens
cgcccagacgtgtgaccaagatagc

SEQ ID NO: 23210 - DNA, 25 bp, Homo sapiens
ctgtccctctagctttgaactacaa

SEQ ID NO: 23211 - DNA, 25 bp, Homo sapiens
gcagaaaaagatgggccttaccggt

SEQ ID NO: 23212 - DNA, 25 bp, Homo sapiens
ggagcagtctttaaggcgacacggc

SEQ ID NO: 23213 - DNA, 25 bp, Homo sapiens
gtagaactgagggcaggacatgagg

SEQ ID NO: 23214 - DNA, 25 bp, Homo sapiens
gtttgtctggattttcctgtagaac

SEQ ID NO: 23215 - DNA, 25 bp, Homo sapiens
tgaccaagatagcaaggagcagtct

SEQ ID NO: 23216 - DNA, 25 bp, Homo sapiens
tgtctggattttcctgtagaactga

SEQ ID NO: 23217 - DNA, 25 bp, Homo sapiens
acttggaggactcaactcttctccc

SEQ ID NO: 23218 - DNA, 25 bp, Homo sapiens
aggtgcctttaaactaggaattgtg

SEQ ID NO: 23219 - DNA, 25 bp, Homo sapiens
caatggagggaaataccaccttcac

SEQ ID NO: 23220 - DNA, 25 bp, Homo sapiens
cctccaattgcattgcttttcaggg

SEQ ID NO: 23221 - DNA, 25 bp, Homo sapiens
gaacgaagagcgattctttggcaat

SEQ ID NO: 23222 - DNA, 25 bp, Homo sapiens
ggagaaccacaaacttggaggactc

SEQ ID NO: 23223 - DNA, 25 bp, Homo sapiens
ggtttcaaagtatgtgctatttaga

SEQ ID NO: 23224 - DNA, 25 bp, Homo sapiens
gtaaaatatcctcacatcacaaaat

SEQ ID NO: 23225 - DNA, 25 bp, Homo sapiens
gtataggtcagatatacctcaaatc

SEQ ID NO: 23226 - DNA, 25 bp, Homo sapiens
tgcattgcttttcagggaggggata

SEQ ID NO: 23227 - DNA, 25 bp, Homo sapiens
tggaatttgccagattgaccaaaaa

SEQ ID NO: 23228 - DNA, 25 bp, Homo sapiens
aaggctgtacaagatttagtgtcat

SEQ ID NO: 23229 - DNA, 25 bp, Homo sapiens
ccaacctaagcttctgccaataagg

SEQ ID NO: 23230 - DNA, 25 bp, Homo sapiens
gaggattttctttgtgtctttggaa

SEQ ID NO: 23231 - DNA, 25 bp, Homo sapiens
ggaagttcacttaccataaagtatt

SEQ ID NO: 23232 - DNA, 25 bp, Homo sapiens
gtgtcattgggtctcatatttgtgt

SEQ ID NO: 23233 - DNA, 25 bp, Homo sapiens
gtgtctttggaagttcacttaccat

SEQ ID NO: 23234 - DNA, 25 bp, Homo sapiens
taagcttctgccaataaggatttca

SEQ ID NO: 23235 - DNA, 25 bp, Homo sapiens
taaggatttcagataagcttttaaa

SEQ ID NO: 23236 - DNA, 25 bp, Homo sapiens
tcattgggtctcatatttgtgttag

SEQ ID NO: 23237 - DNA, 25 bp, Homo sapiens
ttagtgtcattgggtctcatatttg

SEQ ID NO: 23238 - DNA, 25 bp, Homo sapiens
ttctttgtgtctttggaagttcact

SEQ ID NO: 23239 - DNA, 25 bp, Homo sapiens
aagccagctgtagctttatctcgta

SEQ ID NO: 23240 - DNA, 25 bp, Homo sapiens
atctcgtaaaagttacccatcttct

SEQ ID NO: 23241 - DNA, 25 bp, Homo sapiens
cttcaccccagattcaagttttcct

SEQ ID NO: 23242 - DNA, 25 bp, Homo sapiens
cttccctgattggtgtctcagcatt

SEQ ID NO: 23243 - DNA, 25 bp, Homo sapiens
gcttgctgggttgtgggtggacacg

SEQ ID NO: 23244 - DNA, 25 bp, Homo sapiens
gtctcagcatttattttcctgtctc

SEQ ID NO: 23245 - DNA, 25 bp, Homo sapiens
gtggacacgcaaggaggggattttt

SEQ ID NO: 23246 - DNA, 25 bp, Homo sapiens
gtgtgtgttttctggattttctctc

SEQ ID NO: 23247 - DNA, 25 bp, Homo sapiens
gttttcctccttgtaggcatttcat

SEQ ID NO: 23248 - DNA, 25 bp, Homo sapiens
ttatggccatttcaccttattactg

SEQ ID NO: 23249 - DNA, 25 bp, Homo sapiens
tttttatttggccagcagtctcacc

SEQ ID NO: 23250 - DNA, 25 bp, Homo sapiens
aaatctggtcttatacacatggtaa

SEQ ID NO: 23251 - DNA, 25 bp, Homo sapiens
acatatccactgattaatgccacct

SEQ ID NO: 23252 - DNA, 25 bp, Homo sapiens
agttttcactatatcatctgacctt

SEQ ID NO: 23253 - DNA, 25 bp, Homo sapiens
atgatttctccaaatatcctatatt

SEQ ID NO: 23254 - DNA, 25 bp, Homo sapiens
attaactagctccaatattactgaa

SEQ ID NO: 23255 - DNA, 25 bp, Homo sapiens
atttaaagtcttcatacagttatta

SEQ ID NO: 23256 - DNA, 25 bp, Homo sapiens
ctatatcatctgaccttttaatgtt

SEQ ID NO: 23257 - DNA, 25 bp, Homo sapiens
ctgcattctgaaatagttgtctagg

SEQ ID NO: 23258 - DNA, 25 bp, Homo sapiens
tagaaacttgtgtgaggtctcatac

SEQ ID NO: 23259 - DNA, 25 bp, Homo sapiens
tgattaatgccacctatctgctttc

SEQ ID NO: 23260 - DNA, 25 bp, Homo sapiens
ttggtaattgtgtccctactgttaa

SEQ ID NO: 23261 - DNA, 25 bp, Homo sapiens
aacaccagaacatcacacaaagccc

SEQ ID NO: 23262 - DNA, 25 bp, Homo sapiens
agaaagcaatcgtgttctgccacct

SEQ ID NO: 23263 - DNA, 25 bp, Homo sapiens
agccccttgctcagtggcttggggt

SEQ ID NO: 23264 - DNA, 25 bp, Homo sapiens
cccctgcattcatccaatctggaga

SEQ ID NO: 23265 - DNA, 25 bp, Homo sapiens
gatcaggtgccacggacttggagct

SEQ ID NO: 23266 - DNA, 25 bp, Homo sapiens
gcaagagaagtcccatgtgtcaagg

SEQ ID NO: 23267 - DNA, 25 bp, Homo sapiens
gcacacacgcttctcaacagaaagc

SEQ ID NO: 23268 - DNA, 25 bp, Homo sapiens
gccaccagcttgaaattcttcattt

SEQ ID NO: 23269 - DNA, 25 bp, Homo sapiens
gtgcgaatgctgagtgttcaatctt

SEQ ID NO: 23270 - DNA, 25 bp, Homo sapiens
gtggcttggggtttaatactctgta

SEQ ID NO: 23271 - DNA, 25 bp, Homo sapiens
taatactctgtagccaccagcttga

SEQ ID NO: 23272 - DNA, 25 bp, Homo sapiens
acctcacgttacgattttatacata

SEQ ID NO: 23273 - DNA, 25 bp, Homo sapiens
acttctgccgcaacgtgagcgcggc

SEQ ID NO: 23274 - DNA, 25 bp, Homo sapiens
agcctacctcacgttacgattttat

SEQ ID NO: 23275 - DNA, 25 bp, Homo sapiens
cagacattgcacgtggacttctgcc

SEQ ID NO: 23276 - DNA, 25 bp, Homo sapiens
cctcggcaagctgctgcagcgctag

SEQ ID NO: 23277 - DNA, 25 bp, Homo sapiens
ctgcagacattgcacgtggacttct

SEQ ID NO: 23278 - DNA, 25 bp, Homo sapiens
gataagaaagcctacctcacgttac

SEQ ID NO: 23279 - DNA, 25 bp, Homo sapiens
gcaagctgctgcagcgctagacgcc

SEQ ID NO: 23280 - DNA, 25 bp, Homo sapiens
ggggataagaaagcctacctcacgt

SEQ ID NO: 23281 - DNA, 25 bp, Homo sapiens
ttcagaccaccaccgcatattctga

SEQ ID NO: 23282 - DNA, 25 bp, Homo sapiens
ttctgccgcaacgtgagcgcggccg

SEQ ID NO: 23283 - DNA, 25 bp, Homo sapiens
caaaccaagtgactcctgtagttcc

SEQ ID NO: 23284 - DNA, 25 bp, Homo sapiens
ccatttgccccactatggagtcagg

SEQ ID NO: 23285 - DNA, 25 bp, Homo sapiens
ctctgaatttttttactgctgggaa

SEQ ID NO: 23286 - DNA, 25 bp, Homo sapiens
ctggtgtcaaggaaaagcctccctc

SEQ ID NO: 23287 - DNA, 25 bp, Homo sapiens
gaaggatgcttggggctttgctaac

SEQ ID NO: 23288 - DNA, 25 bp, Homo sapiens
gaggccacacaaaccaagtgactcc

SEQ ID NO: 23289 - DNA, 25 bp, Homo sapiens
gcagcttaccacaatagtgcatgct

SEQ ID NO: 23290 - DNA, 25 bp, Homo sapiens
gcataagaggttccagggccatagg

SEQ ID NO: 23291 - DNA, 25 bp, Homo sapiens
ggaatagccactccatgtgatttta

SEQ ID NO: 23292 - DNA, 25 bp, Homo sapiens
ggcagacctaaatcaagcagcttac

SEQ ID NO: 23293 - DNA, 25 bp, Homo sapiens
gtgcatgctgagtagattagttcca

SEQ ID NO: 23294 - DNA, 25 bp, Homo sapiens
ataactccttgtggcattctgaagt

SEQ ID NO: 23295 - DNA, 25 bp, Homo sapiens
cagggaggagccaaacacgggcctt

SEQ ID NO: 23296 - DNA, 25 bp, Homo sapiens
ccaggctctggactaggtgctaggt

SEQ ID NO: 23297 - DNA, 25 bp, Homo sapiens
cccggccatcttgcagcaggaggga

SEQ ID NO: 23298 - DNA, 25 bp, Homo sapiens
ctgaagggctagtggcactgccagg

SEQ ID NO: 23299 - DNA, 25 bp, Homo sapiens
gaagggagtgcgtaggcttccagtg

SEQ ID NO: 23300 - DNA, 25 bp, Homo sapiens
ggaggactttccatctgggagaggc

SEQ ID NO: 23301 - DNA, 25 bp, Homo sapiens
ggtgctaggtttccagggaggagcc

SEQ ID NO: 23302 - DNA, 25 bp, Homo sapiens
gtgaccactggcatctatgcttagc

SEQ ID NO: 23303 - DNA, 25 bp, Homo sapiens
gtggagcttagaggttggtggggaa

SEQ ID NO: 23304 - DNA, 25 bp, Homo sapiens
taggcatgcaccaaggaatcgtaca

SEQ ID NO: 23305 - DNA, 25 bp, Homo sapiens
aaccctgtaagatatttgcggccac

SEQ ID NO: 23306 - DNA, 25 bp, Homo sapiens
acttgctattctatcaaccctgtaa

SEQ ID NO: 23307 - DNA, 25 bp, Homo sapiens
aggatatcctgagtctaagccctgg

SEQ ID NO: 23308 - DNA, 25 bp, Homo sapiens
atctgtgaggttaaaaggctgtgtg

SEQ ID NO: 23309 - DNA, 25 bp, Homo sapiens
cctggtttctgccaatggcaaatag

SEQ ID NO: 23310 - DNA, 25 bp, Homo sapiens
ggctgtgtgtgtgaaaatatcttgg

SEQ ID NO: 23311 - DNA, 25 bp, Homo sapiens
ggttatttggtttgacaaggcactt

SEQ ID NO: 23312 - DNA, 25 bp, Homo sapiens
gtattacttgctattctatcaaccc

SEQ ID NO: 23313 - DNA, 25 bp, Homo sapiens
tccctgagctttgccttagctggaa

SEQ ID NO: 23314 - DNA, 25 bp, Homo sapiens
tgtaagatatttgcggccacgcgcg

SEQ ID NO: 23315 - DNA, 25 bp, Homo sapiens
ttgacaaggcacttaggctccctga

SEQ ID NO: 23316 - DNA, 25 bp, Homo sapiens
acccatcaggcctataggcatcttc

SEQ ID NO: 23317 - DNA, 25 bp, Homo sapiens
atagatgataagggcaacgtcctgc

SEQ ID NO: 23318 - DNA, 25 bp, Homo sapiens
atcagggtcaaacccatcaggccta

SEQ ID NO: 23319 - DNA, 25 bp, Homo sapiens
caaacccatcaggcctataggcatc

SEQ ID NO: 23320 - DNA, 25 bp, Homo sapiens
caggcctataggcatcttctctggc

SEQ ID NO: 23321 - DNA, 25 bp, Homo sapiens
ccccccggcacagaaggagacattg

SEQ ID NO: 23322 - DNA, 25 bp, Homo sapiens
cggcacagaaggagacattggcatc

SEQ ID NO: 23323 - DNA, 25 bp, Homo sapiens
gagacattggcatcagggtcaaacc

SEQ ID NO: 23324 - DNA, 25 bp, Homo sapiens
ggcatcagggtcaaacccatcaggc

SEQ ID NO: 23325 - DNA, 25 bp, Homo sapiens
gtcaaacccatcaggcctataggca

SEQ ID NO: 23326 - DNA, 25 bp, Homo sapiens
tataggcatcttctctggctatgtg

SEQ ID NO: 23327 - DNA, 25 bp, Homo sapiens
aagtagcagacactggaaagtcatg

SEQ ID NO: 23328 - DNA, 25 bp, Homo sapiens
aggggtaggattagacaaagtggct

SEQ ID NO: 23329 - DNA, 25 bp, Homo sapiens
atgcaaatacctacagattcacctg

SEQ ID NO: 23330 - DNA, 25 bp, Homo sapiens
atgcttgacatttaggggtaggatt

SEQ ID NO: 23331 - DNA, 25 bp, Homo sapiens
attttccctgggtggatattgcgtc

SEQ ID NO: 23332 - DNA, 25 bp, Homo sapiens
gattcacctgcacaagtagcagaca

SEQ ID NO: 23333 - DNA, 25 bp, Homo sapiens
gggtggatattgcgtcagggtacag

SEQ ID NO: 23334 - DNA, 25 bp, Homo sapiens
gtgacttatttttaactaccagatc

SEQ ID NO: 23335 - DNA, 25 bp, Homo sapiens
tctgattccttcagtgcatattttc

SEQ ID NO: 23336 - DNA, 25 bp, Homo sapiens
ttaactaccagatctgattccttca

SEQ ID NO: 23337 - DNA, 25 bp, Homo sapiens
ttgcgtcagggtacagtgttctgtg

SEQ ID NO: 23338 - DNA, 25 bp, Homo sapiens
aggtattataccacagcactctatg

SEQ ID NO: 23339 - DNA, 25 bp, Homo sapiens
attataccacagcactctatggaaa

SEQ ID NO: 23340 - DNA, 25 bp, Homo sapiens
cacagcactctatggaaatctcaag

SEQ ID NO: 23341 - DNA, 25 bp, Homo sapiens
ccctgttctctggttgaccattgga

SEQ ID NO: 23342 - DNA, 25 bp, Homo sapiens
gcactctatggaaatctcaagatta

SEQ ID NO: 23343 - DNA, 25 bp, Homo sapiens
gcacttcgtcatgacagtatagagt

SEQ ID NO: 23344 - DNA, 25 bp, Homo sapiens
ggaggaaatttgacctcttcccatt

SEQ ID NO: 23345 - DNA, 25 bp, Homo sapiens
gttctctggttgaccattggataat

SEQ ID NO: 23346 - DNA, 25 bp, Homo sapiens
taaaactcattctattttttctcta

SEQ ID NO: 23347 - DNA, 25 bp, Homo sapiens
tggactgtattcatcaaggtattat

SEQ ID NO: 23348 - DNA, 25 bp, Homo sapiens
ttttttggcattaacatggactgta

SEQ ID NO: 23349 - DNA, 25 bp, Homo sapiens
acatctgcatcttaatgtacaggca

SEQ ID NO: 23350 - DNA, 25 bp, Homo sapiens
agacatcttaatatttgttccatga

SEQ ID NO: 23351 - DNA, 25 bp, Homo sapiens
cagtgtaacagagcacagacagcca

SEQ ID NO: 23352 - DNA, 25 bp, Homo sapiens
ctccagcttggactgcagagacaaa

SEQ ID NO: 23353 - DNA, 25 bp, Homo sapiens
gattaatggtagtcacagtgtaaca

SEQ ID NO: 23354 - DNA, 25 bp, Homo sapiens
gattcaccctgctgacaatgtgcat

SEQ ID NO: 23355 - DNA, 25 bp, Homo sapiens
gccaggttccagggttgggagggca

SEQ ID NO: 23356 - DNA, 25 bp, Homo sapiens
gtaacagcgtttatagtgagggtga

SEQ ID NO: 23357 - DNA, 25 bp, Homo sapiens
gtagatatacagagtttccttaaaa

SEQ ID NO: 23358 - DNA, 25 bp, Homo sapiens
gtttttaatgtctccagcttggact

SEQ ID NO: 23359 - DNA, 25 bp, Homo sapiens
ttctactagaaatacacaccccaca

SEQ ID NO: 23360 - DNA, 25 bp, Homo sapiens
aagtgagacgcagagagcgccttcc

SEQ ID NO: 23361 - DNA, 25 bp, Homo sapiens
atttagagacggcatctcgctccgt

SEQ ID NO: 23362 - DNA, 25 bp, Homo sapiens
catgcctgcttggcccaaagagacc

SEQ ID NO: 23363 - DNA, 25 bp, Homo sapiens
cgccttccagtgatctcattgactg

SEQ ID NO: 23364 - DNA, 25 bp, Homo sapiens
cggcagtggtgccgtcgtaactcac

SEQ ID NO: 23365 - DNA, 25 bp, Homo sapiens
ctactaaattcgcggccgcgtcgac

SEQ ID NO: 23366 - DNA, 25 bp, Homo sapiens
ctccgtcgacgcggtcgcgaattta

SEQ ID NO: 23367 - DNA, 25 bp, Homo sapiens
taagcttggatcctctagagcggcc

SEQ ID NO: 23368 - DNA, 25 bp, Homo sapiens
tggacgctcctggactcgagcgatc

SEQ ID NO: 23369 - DNA, 25 bp, Homo sapiens
aagtgatattctagtttcttcacaa

SEQ ID NO: 23370 - DNA, 25 bp, Homo sapiens
aatcccaacaaagttgcctatagtt

SEQ ID NO: 23371 - DNA, 25 bp, Homo sapiens
gaatattgtccctgcacagttctaa

SEQ ID NO: 23372 - DNA, 25 bp, Homo sapiens
gagttcaaccatcgtcattttaaac

SEQ ID NO: 23373 - DNA, 25 bp, Homo sapiens
gcaagttgacagttccatcagtttg

SEQ ID NO: 23374 - DNA, 25 bp, Homo sapiens
gcacagttctaaattgtccttttat

SEQ ID NO: 23375 - DNA, 25 bp, Homo sapiens
gcacataatgcacattttccgatgg

SEQ ID NO: 23376 - DNA, 25 bp, Homo sapiens
gtagcctttcttaatatgcacataa

SEQ ID NO: 23377 - DNA, 25 bp, Homo sapiens
tactaattaccttgtagcctttctt

SEQ ID NO: 23378 - DNA, 25 bp, Homo sapiens
tagttctgttacgaatattgtccct

SEQ ID NO: 23379 - DNA, 25 bp, Homo sapiens
ttatcagccttactaattaccttgt

SEQ ID NO: 23380 - DNA, 25 bp, Homo sapiens
attagtctttgtgcactggagatga

SEQ ID NO: 23381 - DNA, 25 bp, Homo sapiens
gcagctgagggactcttcaatacag

SEQ ID NO: 23382 - DNA, 25 bp, Homo sapiens
gctgctctacaactttcgagggctg

SEQ ID NO: 23383 - DNA, 25 bp, Homo sapiens
gctgctggtcaccctagcagctgag

SEQ ID NO: 23384 - DNA, 25 bp, Homo sapiens
gggactgtcctagttttagcattga

SEQ ID NO: 23385 - DNA, 25 bp, Homo sapiens
gtctgcaccgacattttcattgagt

SEQ ID NO: 23386 - DNA, 25 bp, Homo sapiens
tattcgggtattttcaatttccttg

SEQ ID NO: 23387 - DNA, 25 bp, Homo sapiens
tctactgaagcctgttctgtctgca

SEQ ID NO: 23388 - DNA, 25 bp, Homo sapiens
ttcaccgttactttttagcaatact

SEQ ID NO: 23389 - DNA, 25 bp, Homo sapiens
ttcctaccagatacagctgctctac

SEQ ID NO: 23390 - DNA, 25 bp, Homo sapiens
ttgagtacggattcttcctaccaga

SEQ ID NO: 23391 - DNA, 25 bp, Homo sapiens
aacaattctgtctatgccttgctgg

SEQ ID NO: 23392 - DNA, 25 bp, Homo sapiens
aaggtgctaagttttctacaataat

SEQ ID NO: 23393 - DNA, 25 bp, Homo sapiens
aatgttgacaatatttcttccttca

SEQ ID NO: 23394 - DNA, 25 bp, Homo sapiens
catttatagcacatgacagccaatc

SEQ ID NO: 23395 - DNA, 25 bp, Homo sapiens
gcaactggtactaatcaggcttttt

SEQ ID NO: 23396 - DNA, 25 bp, Homo sapiens
gccttgctggttcacagatggcatt

SEQ ID NO: 23397 - DNA, 25 bp, Homo sapiens
ggaacctgtagataatttacttctg

SEQ ID NO: 23398 - DNA, 25 bp, Homo sapiens
ggcctgagagactttcactaaagga

SEQ ID NO: 23399 - DNA, 25 bp, Homo sapiens
gtaataatgcttcactcaaggttat

SEQ ID NO: 23400 - DNA, 25 bp, Homo sapiens
ttattggtatggtgttgagtgtgtg

SEQ ID NO: 23401 - DNA, 25 bp, Homo sapiens
tttgatgttcagtatcttagcgaga

SEQ ID NO: 23402 - DNA, 25 bp, Homo sapiens
agcttacttagggggcccaagcagg

SEQ ID NO: 23403 - DNA, 25 bp, Homo sapiens
agttacagtcagagctgggcacagt

SEQ ID NO: 23404 - DNA, 25 bp, Homo sapiens
caaggcagcaagaccgcgtgagccc

SEQ ID NO: 23405 - DNA, 25 bp, Homo sapiens
catccttatgacagcactgcagtat

SEQ ID NO: 23406 - DNA, 25 bp, Homo sapiens
ccatgcatccttatgacagcactgc

SEQ ID NO: 23407 - DNA, 25 bp, Homo sapiens
gacagcactgcagtatacaggttat

SEQ ID NO: 23408 - DNA, 25 bp, Homo sapiens
gtatacaggttattatctagggcaa

SEQ ID NO: 23409 - DNA, 25 bp, Homo sapiens
taccatgcatccttatgacagcact

SEQ ID NO: 23410 - DNA, 25 bp, Homo sapiens
tagaatcccagcttacttagggggc

SEQ ID NO: 23411 - DNA, 25 bp, Homo sapiens
tatatggcctgactaagtgcctgcc

SEQ ID NO: 23412 - DNA, 25 bp, Homo sapiens
tggcctgactaagtgcctgccattc

SEQ ID NO: 23413 - DNA, 25 bp, Homo sapiens
acactgagactatcctgtctcacct

SEQ ID NO: 23414 - DNA, 25 bp, Homo sapiens
acattgttcgatttttcagcagact

SEQ ID NO: 23415 - DNA, 25 bp, Homo sapiens
acctcaattagttctactctacact

SEQ ID NO: 23416 - DNA, 25 bp, Homo sapiens
agtcgttctcatgctgacggggaga

SEQ ID NO: 23417 - DNA, 25 bp, Homo sapiens
ctcattattcctttacatgcagaat

SEQ ID NO: 23418 - DNA, 25 bp, Homo sapiens
ctttcactatcatcaacactgagac

SEQ ID NO: 23419 - DNA, 25 bp, Homo sapiens
gaaatatctctacaaacctcaatta

SEQ ID NO: 23420 - DNA, 25 bp, Homo sapiens
gtggaaactttacattgttcgattt

SEQ ID NO: 23421 - DNA, 25 bp, Homo sapiens
tactctacactttcactatcatcaa

SEQ ID NO: 23422 - DNA, 25 bp, Homo sapiens
tattcctcagtggagagtcgttctc

SEQ ID NO: 23423 - DNA, 25 bp, Homo sapiens
tcctgtctcacctacaaatgtggaa

SEQ ID NO: 23424 - DNA, 25 bp, Homo sapiens
aagtactactatcatctctgtattg

SEQ ID NO: 23425 - DNA, 25 bp, Homo sapiens
aatattgttaatgcttaccctaagt

SEQ ID NO: 23426 - DNA, 25 bp, Homo sapiens
ataagcgctttggacacactttaat

SEQ ID NO: 23427 - DNA, 25 bp, Homo sapiens
ctatcatctctgtattgtttaacaa

SEQ ID NO: 23428 - DNA, 25 bp, Homo sapiens
gaactctatataacattttgaataa

SEQ ID NO: 23429 - DNA, 25 bp, Homo sapiens
gacacactttaataaatgctctatt

SEQ ID NO: 23430 - DNA, 25 bp, Homo sapiens
gagacagagtcccactctgtcaccc

SEQ ID NO: 23431 - DNA, 25 bp, Homo sapiens
gcctgcctcgaagatgctttattta

SEQ ID NO: 23432 - DNA, 25 bp, Homo sapiens
gctctattgtatacagttgaactct

SEQ ID NO: 23433 - DNA, 25 bp, Homo sapiens
gcttaccctaagtactactatcatc

SEQ ID NO: 23434 - DNA, 25 bp, Homo sapiens
tttcctcctaacctcaagtgagccg

SEQ ID NO: 23435 - DNA, 25 bp, Homo sapiens
acatcatctcaaatagcagcatcga

SEQ ID NO: 23436 - DNA, 25 bp, Homo sapiens
acccattatatggcacaacatcagg

SEQ ID NO: 23437 - DNA, 25 bp, Homo sapiens
accctgtcacatcatctcaaatagc

SEQ ID NO: 23438 - DNA, 25 bp, Homo sapiens
atcagaatcagtaccttatcttcac

SEQ ID NO: 23439 - DNA, 25 bp, Homo sapiens
cagagagttctgtctattccttctc

SEQ ID NO: 23440 - DNA, 25 bp, Homo sapiens
ccaagtctgatccaacatgtgtagt

SEQ ID NO: 23441 - DNA, 25 bp, Homo sapiens
ctattccttctcaaacccattatat

SEQ ID NO: 23442 - DNA, 25 bp, Homo sapiens
gggaagtggtaactgtgcctttgtc

SEQ ID NO: 23443 - DNA, 25 bp, Homo sapiens
gtgcctttgtcaatccagtttacgg

SEQ ID NO: 23444 - DNA, 25 bp, Homo sapiens
tctgatagaaactcatcttctacaa

SEQ ID NO: 23445 - DNA, 25 bp, Homo sapiens
ttgaagtctccacaatctgatagaa

SEQ ID NO: 23446 - DNA, 25 bp, Homo sapiens
aattctatgttggtgttgtgggcct

SEQ ID NO: 23447 - DNA, 25 bp, Homo sapiens
accaatcctgaagctacaccacagt

SEQ ID NO: 23448 - DNA, 25 bp, Homo sapiens
accagccccagaacacaatttttat

SEQ ID NO: 23449 - DNA, 25 bp, Homo sapiens
atgagctgacccttattaccagccc

SEQ ID NO: 23450 - DNA, 25 bp, Homo sapiens
cacttagtctaactctatgagctga

SEQ ID NO: 23451 - DNA, 25 bp, Homo sapiens
gagagtcagtttgcaagttggagag

SEQ ID NO: 23452 - DNA, 25 bp, Homo sapiens
gagtcataccgtgcacacttagtct

SEQ ID NO: 23453 - DNA, 25 bp, Homo sapiens
ggtgttgtgggcctacagtaagtag

SEQ ID NO: 23454 - DNA, 25 bp, Homo sapiens
gtccacccccaactaaaatcattgt

SEQ ID NO: 23455 - DNA, 25 bp, Homo sapiens
gtggaagcgtggttaaccaatcctg

SEQ ID NO: 23456 - DNA, 25 bp, Homo sapiens
tccaccctgcctgttcaaaacataa

SEQ ID NO: 23457 - DNA, 25 bp, Homo sapiens
aaatggaaggcaccaagccacacca

SEQ ID NO: 23458 - DNA, 25 bp, Homo sapiens
cgaggagtcagacaccgacgtggaa

SEQ ID NO: 23459 - DNA, 25 bp, Homo sapiens
gaaaaggccattgactacaccacca

SEQ ID NO: 23460 - DNA, 25 bp, Homo sapiens
gaatctggccagcacatagcgatat

SEQ ID NO: 23461 - DNA, 25 bp, Homo sapiens
gatgattttggtttcgttaagcttt

SEQ ID NO: 23462 - DNA, 25 bp, Homo sapiens
ggaggctatgacagcgatgttgcta

SEQ ID NO: 23463 - DNA, 25 bp, Homo sapiens
ggcccacctgtgagggaatctggcc

SEQ ID NO: 23464 - DNA, 25 bp, Homo sapiens
gtcaagggacagcacgcaagattca

SEQ ID NO: 23465 - DNA, 25 bp, Homo sapiens
gtgaggtggctgcacaatgactctg

SEQ ID NO: 23466 - DNA, 25 bp, Homo sapiens
tggaagaaagaccacccgttagccg

SEQ ID NO: 23467 - DNA, 25 bp, Homo sapiens
ttcccttttagccaccggagatgat

SEQ ID NO: 23468 - DNA, 25 bp, Homo sapiens
acgcaaggctggggagacatcggct

SEQ ID NO: 23469 - DNA, 25 bp, Homo sapiens
ctaccaccaggacacgcaaggctgg

SEQ ID NO: 23470 - DNA, 25 bp, Homo sapiens
ctgccaggagtgtctctaagagatc

SEQ ID NO: 23471 - DNA, 25 bp, Homo sapiens
cttcaccgcgactgttaagccaaga

SEQ ID NO: 23472 - DNA, 25 bp, Homo sapiens
cttcggcgtggccatagtgggcaac

SEQ ID NO: 23473 - DNA, 25 bp, Homo sapiens
cttgtacgtgcatcacacctacgtg

SEQ ID NO: 23474 - DNA, 25 bp, Homo sapiens
gacatcggctacagtttcgtggtgg

SEQ ID NO: 23475 - DNA, 25 bp, Homo sapiens
ggacggctacgtgtacgagggacgc

SEQ ID NO: 23476 - DNA, 25 bp, Homo sapiens
gtggccatagtgggcaactacaccg

SEQ ID NO: 23477 - DNA, 25 bp, Homo sapiens
tgccgctgggattcttgtacgtgca

SEQ ID NO: 23478 - DNA, 25 bp, Homo sapiens
tgttaagccaagacctgccaggagt

SEQ ID NO: 23479 - DNA, 25 bp, Homo sapiens
aataatggatgtccttgttctgatt

SEQ ID NO: 23480 - DNA, 25 bp, Homo sapiens
acacccaatgtttgagtgattctgt

SEQ ID NO: 23481 - DNA, 25 bp, Homo sapiens
agatggccaatgttattccagtgat

SEQ ID NO: 23482 - DNA, 25 bp, Homo sapiens
agggaatatcaagagtgttactggg

SEQ ID NO: 23483 - DNA, 25 bp, Homo sapiens
aggtcacatactctgtttgcaccac

SEQ ID NO: 23484 - DNA, 25 bp, Homo sapiens
gagcgtgaagaccaaggggagtaat

SEQ ID NO: 23485 - DNA, 25 bp, Homo sapiens
gtgaatcacgggccttgaaagtatt

SEQ ID NO: 23486 - DNA, 25 bp, Homo sapiens
gttactgggttttgtgaatcacggg

SEQ ID NO: 23487 - DNA, 25 bp, Homo sapiens
tagtcaaagtccttacctttgtttg

SEQ ID NO: 23488 - DNA, 25 bp, Homo sapiens
tctgtttgcaccacgcttaggaagg

SEQ ID NO: 23489 - DNA, 25 bp, Homo sapiens
tgagtgattctgtatactgataggg

SEQ ID NO: 23490 - DNA, 25 bp, Homo sapiens
atactttgtatgtttttgtcttctt

SEQ ID NO: 23491 - DNA, 25 bp, Homo sapiens
caaagctaatagggacgtttatatc

SEQ ID NO: 23492 - DNA, 25 bp, Homo sapiens
ccattctattgctttgacaccttta

SEQ ID NO: 23493 - DNA, 25 bp, Homo sapiens
cctttactaggtgaattggtggcat

SEQ ID NO: 23494 - DNA, 25 bp, Homo sapiens
ctattgctttgacacctttactagg

SEQ ID NO: 23495 - DNA, 25 bp, Homo sapiens
gaaacatttctgtatatattgttga

SEQ ID NO: 23496 - DNA, 25 bp, Homo sapiens
gaaagacggaggaaacaatcaaaat

SEQ ID NO: 23497 - DNA, 25 bp, Homo sapiens
gctaatagggacgtttatatcaaga

SEQ ID NO: 23498 - DNA, 25 bp, Homo sapiens
gctttgacacctttactaggtgaat

SEQ ID NO: 23499 - DNA, 25 bp, Homo sapiens
gttgaattttagttgtacatatact

SEQ ID NO: 23500 - DNA, 25 bp, Homo sapiens
tattgctttgacacctttactaggt

SEQ ID NO: 23501 - DNA, 25 bp, Homo sapiens
agttgtttagttccaaagcccatgc

SEQ ID NO: 23502 - DNA, 25 bp, Homo sapiens
attttgttggagatacccagcagct

SEQ ID NO: 23503 - DNA, 25 bp, Homo sapiens
caaagcccatgctcattctgttgca

SEQ ID NO: 23504 - DNA, 25 bp, Homo sapiens
gctcattctgttgcaccaggaagtg

SEQ ID NO: 23505 - DNA, 25 bp, Homo sapiens
ggaactaatacaaactgcattcagg

SEQ ID NO: 23506 - DNA, 25 bp, Homo sapiens
ggaatgtgcaccaagatggatctga

SEQ ID NO: 23507 - DNA, 25 bp, Homo sapiens
gggcagagctgatttttggcttgaa

SEQ ID NO: 23508 - DNA, 25 bp, Homo sapiens
ggggaagaatcagttgccaagtgtt

SEQ ID NO: 23509 - DNA, 25 bp, Homo sapiens
ggtagcatcagaggacttagcaatc

SEQ ID NO: 23510 - DNA, 25 bp, Homo sapiens
gtgactgggatgatgttgctccact

SEQ ID NO: 23511 - DNA, 25 bp, Homo sapiens
gttgctccactaacaggtaaccaag

SEQ ID NO: 23512 - DNA, 25 bp, Homo sapiens
atacctcagagtctcatgttcagca

SEQ ID NO: 23513 - DNA, 25 bp, Homo sapiens
atgcttcccattggtgctgtggtga

SEQ ID NO: 23514 - DNA, 25 bp, Homo sapiens
caaatactcaagactgcacccatgg

SEQ ID NO: 23515 - DNA, 25 bp, Homo sapiens
gaactcaatggtgtgctctgtgcaa

SEQ ID NO: 23516 - DNA, 25 bp, Homo sapiens
gattatgtcttgtgtcatgcttccc

SEQ ID NO: 23517 - DNA, 25 bp, Homo sapiens
ggtttttggattcgtcatggctatt

SEQ ID NO: 23518 - DNA, 25 bp, Homo sapiens
tagccacgcttgtgtcattgctgat

SEQ ID NO: 23519 - DNA, 25 bp, Homo sapiens
tgatggtcatcactgtagccacgct

SEQ ID NO: 23520 - DNA, 25 bp, Homo sapiens
tggtgggaatctttcatcggttttc

SEQ ID NO: 23521 - DNA, 25 bp, Homo sapiens
tttatcattccatcagcctgttatc

SEQ ID NO: 23522 - DNA, 25 bp, Homo sapiens
tttcctgacaatttctctctcacaa

SEQ ID NO: 23523 - DNA, 25 bp, Homo sapiens
agaccgactggactttaattctggc

SEQ ID NO: 23524 - DNA, 25 bp, Homo sapiens
attccacgacagaacttcactaaat

SEQ ID NO: 23525 - DNA, 25 bp, Homo sapiens
cacgacagaacttcactaaatgtgt

SEQ ID NO: 23526 - DNA, 25 bp, Homo sapiens
cctgtaaggccatgggacacacagc

SEQ ID NO: 23527 - DNA, 25 bp, Homo sapiens
cttctgtgtgaacattccacgacag

SEQ ID NO: 23528 - DNA, 25 bp, Homo sapiens
gaacattccacgacagaacttcact

SEQ ID NO: 23529 - DNA, 25 bp, Homo sapiens
gctttgaatgcagaccgactggact

SEQ ID NO: 23530 - DNA, 25 bp, Homo sapiens
gtgtgatcttgtacatgttacttaa

SEQ ID NO: 23531 - DNA, 25 bp, Homo sapiens
taattctggctttactagttgtgat

SEQ ID NO: 23532 - DNA, 25 bp, Homo sapiens
tcatgtggtcatcccctgttagatg

SEQ ID NO: 23533 - DNA, 25 bp, Homo sapiens
tcctgggctggaagtctgtgtatga

SEQ ID NO: 23534 - DNA, 25 bp, Homo sapiens
aaaatacacatatgtcagactcttt

SEQ ID NO: 23535 - DNA, 25 bp, Homo sapiens
aaatcccaagtgatgttgcctcatt

SEQ ID NO: 23536 - DNA, 25 bp, Homo sapiens
aagtaagtcttcctatggcatgttc

SEQ ID NO: 23537 - DNA, 25 bp, Homo sapiens
attccaagtcagttttgtagaccat

SEQ ID NO: 23538 - DNA, 25 bp, Homo sapiens
caagtgatgttgcctcattccaagt

SEQ ID NO: 23539 - DNA, 25 bp, Homo sapiens
caggtcatctttttgtggaaatgct

SEQ ID NO: 23540 - DNA, 25 bp, Homo sapiens
cttcctatggcatgttcaggccctc

SEQ ID NO: 23541 - DNA, 25 bp, Homo sapiens
ggtaaaagcacaaaacaggtcatct

SEQ ID NO: 23542 - DNA, 25 bp, Homo sapiens
tatgtcagactctttattatggtaa

SEQ ID NO: 23543 - DNA, 25 bp, Homo sapiens
ttatcttctgatttttgttcctaaa

SEQ ID NO: 23544 - DNA, 25 bp, Homo sapiens
ttctttgttttctatggttattgtt

SEQ ID NO: 23545 - DNA, 25 bp, Homo sapiens
aacaatgctaccatctgataagggt

SEQ ID NO: 23546 - DNA, 25 bp, Homo sapiens
cttgcaatcaatttgagtgactcag

SEQ ID NO: 23547 - DNA, 25 bp, Homo sapiens
gaactggaaacaatgctaccatctg

SEQ ID NO: 23548 - DNA, 25 bp, Homo sapiens
gaactggcgtaagaggcaacagagc

SEQ ID NO: 23549 - DNA, 25 bp, Homo sapiens
gaagtaggggctgaagaggaaggtg

SEQ ID NO: 23550 - DNA, 25 bp, Homo sapiens
gaggcaatattttctacttgcaatc

SEQ ID NO: 23551 - DNA, 25 bp, Homo sapiens
gcaacagagccgtctagaagaacaa

SEQ ID NO: 23552 - DNA, 25 bp, Homo sapiens
gcagcaatactttaggatccacgtg

SEQ ID NO: 23553 - DNA, 25 bp, Homo sapiens
ggagactatgtcagcagcaatactt

SEQ ID NO: 23554 - DNA, 25 bp, Homo sapiens
gtgactcttggattacagcatggag

SEQ ID NO: 23555 - DNA, 25 bp, Homo sapiens
taggatccacgtggcagaactggaa

SEQ ID NO: 23556 - DNA, 25 bp, Homo sapiens
acaggcatagaggtgacttttggaa

SEQ ID NO: 23557 - DNA, 25 bp, Homo sapiens
aggacatttcaggccggcagagtaa

SEQ ID NO: 23558 - DNA, 25 bp, Homo sapiens
agggctgtcactggatattttgcta

SEQ ID NO: 23559 - DNA, 25 bp, Homo sapiens
gaaccaggcttccacgactgggttc

SEQ ID NO: 23560 - DNA, 25 bp, Homo sapiens
gagggaggtctttaagatcgctttt

SEQ ID NO: 23561 - DNA, 25 bp, Homo sapiens
gagggcctgttggtcaatgtgttgg

SEQ ID NO: 23562 - DNA, 25 bp, Homo sapiens
gccagccttgattggaagaacttcc

SEQ ID NO: 23563 - DNA, 25 bp, Homo sapiens
gggaaacttcaggccagccttgatt

SEQ ID NO: 23564 - DNA, 25 bp, Homo sapiens
ggttctacccaggccagtgggaaga

SEQ ID NO: 23565 - DNA, 25 bp, Homo sapiens
taaaatagtttccaggacttgtcta

SEQ ID NO: 23566 - DNA, 25 bp, Homo sapiens
ttgaatccagagggcctgttggtca

SEQ ID NO: 23567 - DNA, 25 bp, Homo sapiens
aaatgttttcaacccagttcatctg

SEQ ID NO: 23568 - DNA, 25 bp, Homo sapiens
aatcctgcagcttggtttaatgagt

SEQ ID NO: 23569 - DNA, 25 bp, Homo sapiens
gaaaataactactcacaacattcac

SEQ ID NO: 23570 - DNA, 25 bp, Homo sapiens
gaacatacttctaatcaaaggtgct

SEQ ID NO: 23571 - DNA, 25 bp, Homo sapiens
gacagaaaacttgcccaatactgag

SEQ ID NO: 23572 - DNA, 25 bp, Homo sapiens
gcacaactgagaatcctgcagcttg

SEQ ID NO: 23573 - DNA, 25 bp, Homo sapiens
ggtgctatgtccttgtgtatggtac

SEQ ID NO: 23574 - DNA, 25 bp, Homo sapiens
ggtggatgtttttgcaggttactct

SEQ ID NO: 23575 - DNA, 25 bp, Homo sapiens
gtatggtactaaatgtgtcctgtgt

SEQ ID NO: 23576 - DNA, 25 bp, Homo sapiens
gttactctgagaattttgcttatga

SEQ ID NO: 23577 - DNA, 25 bp, Homo sapiens
tttccttttgtctgggcagtagtga

SEQ ID NO: 23578 - DNA, 25 bp, Homo sapiens
aagctgacgtcccaaatttctattt

SEQ ID NO: 23579 - DNA, 25 bp, Homo sapiens
agactgctttctgtgttttgggtga

SEQ ID NO: 23580 - DNA, 25 bp, Homo sapiens
caaacgctctgccgtgaaactgtct

SEQ ID NO: 23581 - DNA, 25 bp, Homo sapiens
ctccttacgtgtacggtcctgtgat

SEQ ID NO: 23582 - DNA, 25 bp, Homo sapiens
gacgagagaccgactgggaatcctc

SEQ ID NO: 23583 - DNA, 25 bp, Homo sapiens
gccgagggccggtggatccctcggt

SEQ ID NO: 23584 - DNA, 25 bp, Homo sapiens
ggaacttccgtccagagacgagaga

SEQ ID NO: 23585 - DNA, 25 bp, Homo sapiens
ggaatcctctcagtcaaggtccaaa

SEQ ID NO: 23586 - DNA, 25 bp, Homo sapiens
gggtgaatccgtgtatttctgtatc

SEQ ID NO: 23587 - DNA, 25 bp, Homo sapiens
tcctcggctcagagtccgtgaggcc

SEQ ID NO: 23588 - DNA, 25 bp, Homo sapiens
tgagtttaagcacgccagccaaacg

SEQ ID NO: 23589 - DNA, 25 bp, Homo sapiens
acatgaggaggctcctcctggtcac

SEQ ID NO: 23590 - DNA, 25 bp, Homo sapiens
accaaggcctggatggagaccgagg

SEQ ID NO: 23591 - DNA, 25 bp, Homo sapiens
agatgcaagtcaaacactggccctc

SEQ ID NO: 23592 - DNA, 25 bp, Homo sapiens
aggaagaccaagaccacatctacca

SEQ ID NO: 23593 - DNA, 25 bp, Homo sapiens
caaggcccaggctgttgggactggg

SEQ ID NO: 23594 - DNA, 25 bp, Homo sapiens
caaggtccctatcaagatgcaagtc

SEQ ID NO: 23595 - DNA, 25 bp, Homo sapiens
gatgccaaatcaccaggtgctcctg

SEQ ID NO: 23596 - DNA, 25 bp, Homo sapiens
gccccggttgtgggtgatgccaaat

SEQ ID NO: 23597 - DNA, 25 bp, Homo sapiens
gtggagcctccggagaaggacgacc

SEQ ID NO: 23598 - DNA, 25 bp, Homo sapiens
tccagaagccgaaactcttgaccac

SEQ ID NO: 23599 - DNA, 25 bp, Homo sapiens
tgttccctgtccagaagccgaaact

SEQ ID NO: 23600 - DNA, 25 bp, Homo sapiens
aaatatttgatctaggagctcttat

SEQ ID NO: 23601 - DNA, 25 bp, Homo sapiens
aatagcactttgaagctgagcatgg

SEQ ID NO: 23602 - DNA, 25 bp, Homo sapiens
aggagctcttatctaaaatgccata

SEQ ID NO: 23603 - DNA, 25 bp, Homo sapiens
ctgggaggtcgaggctgtagtgagg

SEQ ID NO: 23604 - DNA, 25 bp, Homo sapiens
gagatgggaggactacttgagcctg

SEQ ID NO: 23605 - DNA, 25 bp, Homo sapiens
ggatacaaattatgactgcattgaa

SEQ ID NO: 23606 - DNA, 25 bp, Homo sapiens
ggtttagcatttagttctctttatt

SEQ ID NO: 23607 - DNA, 25 bp, Homo sapiens
gtatgaaacctgtgctagggattat

SEQ ID NO: 23608 - DNA, 25 bp, Homo sapiens
tggtgatgcatgcctttagtcccag

SEQ ID NO: 23609 - DNA, 25 bp, Homo sapiens
tgtagtgaggcatgattgcaccact

SEQ ID NO: 23610 - DNA, 25 bp, Homo sapiens
ttatagtggatctttattgttcatt

SEQ ID NO: 23611 - DNA, 25 bp, Homo sapiens
actgcagagaaagatcattttccca

SEQ ID NO: 23612 - DNA, 25 bp, Homo sapiens
agcacctcttcaagtgagatggcag

SEQ ID NO: 23613 - DNA, 25 bp, Homo sapiens
cattgacaagactttggttggggat

SEQ ID NO: 23614 - DNA, 25 bp, Homo sapiens
ctgctagacggccacactgcagaga

SEQ ID NO: 23615 - DNA, 25 bp, Homo sapiens
gaaggagtgactgaacattgacaag

SEQ ID NO: 23616 - DNA, 25 bp, Homo sapiens
gagattagctgctagacggccacac

SEQ ID NO: 23617 - DNA, 25 bp, Homo sapiens
ggcagaccacctcaggatggaaatg

SEQ ID NO: 23618 - DNA, 25 bp, Homo sapiens
ggttggggatggtcagagaggagat

SEQ ID NO: 23619 - DNA, 25 bp, Homo sapiens
gtgacctcctgcaaataagggagag

SEQ ID NO: 23620 - DNA, 25 bp, Homo sapiens
gtgagatggcagaccacctcaggat

SEQ ID NO: 23621 - DNA, 25 bp, Homo sapiens
tgccagtcaaagaaacaatgtcaac

SEQ ID NO: 23622 - DNA, 25 bp, Homo sapiens
aacagatcccatcgacatcattttt

SEQ ID NO: 23623 - DNA, 25 bp, Homo sapiens
aacgtggcacagttccgagtgcagt

SEQ ID NO: 23624 - DNA, 25 bp, Homo sapiens
atgagcgtccttgtgaacgtggcac

SEQ ID NO: 23625 - DNA, 25 bp, Homo sapiens
catggtgaacaatgtctgcctctga

SEQ ID NO: 23626 - DNA, 25 bp, Homo sapiens
catttcttcgtggccagtgtttggg

SEQ ID NO: 23627 - DNA, 25 bp, Homo sapiens
gcctctgaagtgctcagcagaccgt

SEQ ID NO: 23628 - DNA, 25 bp, Homo sapiens
ggcggtagtggtgcattgtgacctc

SEQ ID NO: 23629 - DNA, 25 bp, Homo sapiens
gtaactttctccataatctggcagt

SEQ ID NO: 23630 - DNA, 25 bp, Homo sapiens
gttaagcttaatgtctctgtttctg

SEQ ID NO: 23631 - DNA, 25 bp, Homo sapiens
tgtgacctcattattctgcttttgg

SEQ ID NO: 23632 - DNA, 25 bp, Homo sapiens
tttggtttctcgccttgtaatatga

SEQ ID NO: 23633 - DNA, 25 bp, Homo sapiens
aacgttttattttatgcttgccatg

SEQ ID NO: 23634 - DNA, 25 bp, Homo sapiens
accaggccctgttctaggcatttga

SEQ ID NO: 23635 - DNA, 25 bp, Homo sapiens
agcagttctacatttcaagtgattg

SEQ ID NO: 23636 - DNA, 25 bp, Homo sapiens
cagtggctaagagatatgtttgaca

SEQ ID NO: 23637 - DNA, 25 bp, Homo sapiens
gaaaccacttttgactttgtgcatg

SEQ ID NO: 23638 - DNA, 25 bp, Homo sapiens
gacattatgactcactccatcttaa

SEQ ID NO: 23639 - DNA, 25 bp, Homo sapiens
gactcactccatcttaaataaccaa

SEQ ID NO: 23640 - DNA, 25 bp, Homo sapiens
gtaatgccagggggatagaatgaca

SEQ ID NO: 23641 - DNA, 25 bp, Homo sapiens
tgactttgtgcatgctatttagcag

SEQ ID NO: 23642 - DNA, 25 bp, Homo sapiens
tgagatacagatctgtctcctgctc

SEQ ID NO: 23643 - DNA, 25 bp, Homo sapiens
tgcttgccatgtatgcaccaggccc

SEQ ID NO: 23644 - DNA, 25 bp, Homo sapiens
atctcaacaccatgttgtctgcaac

SEQ ID NO: 23645 - DNA, 25 bp, Homo sapiens
cacatgacagccattgaagcctgtg

SEQ ID NO: 23646 - DNA, 25 bp, Homo sapiens
cagctcacatggaacagggccgggt

SEQ ID NO: 23647 - DNA, 25 bp, Homo sapiens
cagggccgggtatgactttgcaact

SEQ ID NO: 23648 - DNA, 25 bp, Homo sapiens
ccaccatgcaagatctcaacaccat

SEQ ID NO: 23649 - DNA, 25 bp, Homo sapiens
cctccttggcagctcacatggaaca

SEQ ID NO: 23650 - DNA, 25 bp, Homo sapiens
gaagctgaaggagtcttttctgaca

SEQ ID NO: 23651 - DNA, 25 bp, Homo sapiens
gcagtggccactatggggtctgggc

SEQ ID NO: 23652 - DNA, 25 bp, Homo sapiens
ggaacagggccgggtatgactttgc

SEQ ID NO: 23653 - DNA, 25 bp, Homo sapiens
gtatgactttgcaactgaagctgaa

SEQ ID NO: 23654 - DNA, 25 bp, Homo sapiens
gtctgcaacacatgacagccattga

SEQ ID NO: 23655 - DNA, 25 bp, Homo sapiens
accactgatatcttttctgtctcta

SEQ ID NO: 23656 - DNA, 25 bp, Homo sapiens
acgggcttctgtattcgacagttta

SEQ ID NO: 23657 - DNA, 25 bp, Homo sapiens
ccttttaagcagtcattctcctctt

SEQ ID NO: 23658 - DNA, 25 bp, Homo sapiens
ctggcaaccactgatatcttttctg

SEQ ID NO: 23659 - DNA, 25 bp, Homo sapiens
gaaactgttaccactatctagttct

SEQ ID NO: 23660 - DNA, 25 bp, Homo sapiens
gaacatgtttacgggcttctgtatt

SEQ ID NO: 23661 - DNA, 25 bp, Homo sapiens
gacagtttattttggctcttatatt

SEQ ID NO: 23662 - DNA, 25 bp, Homo sapiens
gttaataccagcttagacagtttat

SEQ ID NO: 23663 - DNA, 25 bp, Homo sapiens
gtttgaatctcagaaccttcttttc

SEQ ID NO: 23664 - DNA, 25 bp, Homo sapiens
ttaggcttggtttcatgggcagaaa

SEQ ID NO: 23665 - DNA, 25 bp, Homo sapiens
ttttcatcaccccaagaggaaacct

SEQ ID NO: 23666 - DNA, 25 bp, Homo sapiens
aaggaaaactgtcctgtaattcctg

SEQ ID NO: 23667 - DNA, 25 bp, Homo sapiens
agtggttccatacttcttgtaaaag

SEQ ID NO: 23668 - DNA, 25 bp, Homo sapiens
agtttgggtattgtttgctgtatca

SEQ ID NO: 23669 - DNA, 25 bp, Homo sapiens
atatttaatgactcactcagtgtat

SEQ ID NO: 23670 - DNA, 25 bp, Homo sapiens
catgcattgtctcattatccctagg

SEQ ID NO: 23671 - DNA, 25 bp, Homo sapiens
gagatgctttgatagctgtgtgact

SEQ ID NO: 23672 - DNA, 25 bp, Homo sapiens
gagggttcatgggccaataagtgca

SEQ ID NO: 23673 - DNA, 25 bp, Homo sapiens
gctttccatgcattgtctcattatc

SEQ ID NO: 23674 - DNA, 25 bp, Homo sapiens
gtagctgtatttgtctagtggtgca

SEQ ID NO: 23675 - DNA, 25 bp, Homo sapiens
tatccctaggatacgtgctaaagga

SEQ ID NO: 23676 - DNA, 25 bp, Homo sapiens
ttacatctgtcaagtggttccatac

SEQ ID NO: 23677 - DNA, 25 bp, Homo sapiens
aaattggctacatttctcacttctc

SEQ ID NO: 23678 - DNA, 25 bp, Homo sapiens
accagcgatgggatgtatacttttg

SEQ ID NO: 23679 - DNA, 25 bp, Homo sapiens
agagaataaagtcttctgtggcttt

SEQ ID NO: 23680 - DNA, 25 bp, Homo sapiens
agtggctatcactgaaactctttcc

SEQ ID NO: 23681 - DNA, 25 bp, Homo sapiens
atttcagccttataattagcaaaaa

SEQ ID NO: 23682 - DNA, 25 bp, Homo sapiens
ctcacttctcctatcatgtggtcaa

SEQ ID NO: 23683 - DNA, 25 bp, Homo sapiens
gctctgggaatgacttatggtccaa

SEQ ID NO: 23684 - DNA, 25 bp, Homo sapiens
gtggtcaaagttattgttgtatacc

SEQ ID NO: 23685 - DNA, 25 bp, Homo sapiens
tctgtggctttagtggctatcactg

SEQ ID NO: 23686 - DNA, 25 bp, Homo sapiens
ttctcctatcatgtggtcaaagtta

SEQ ID NO: 23687 - DNA, 25 bp, Homo sapiens
ttttaggtttctgtactttctgtag

SEQ ID NO: 23688 - DNA, 25 bp, Homo sapiens
actgtacccaagttacatcttcttt

SEQ ID NO: 23689 - DNA, 25 bp, Homo sapiens
aggcagggcacctgtgtacgtcaat

SEQ ID NO: 23690 - DNA, 25 bp, Homo sapiens
cacatgggattggctagacactcta

SEQ ID NO: 23691 - DNA, 25 bp, Homo sapiens
cagaccagctacaacagcaggaccc

SEQ ID NO: 23692 - DNA, 25 bp, Homo sapiens
cttccagctttcagaccagctacaa

SEQ ID NO: 23693 - DNA, 25 bp, Homo sapiens
gacactctagagctttactgtaccc

SEQ ID NO: 23694 - DNA, 25 bp, Homo sapiens
gagggcagtccacatgggattggct

SEQ ID NO: 23695 - DNA, 25 bp, Homo sapiens
gatcttaatttcccatagtgctatg

SEQ ID NO: 23696 - DNA, 25 bp, Homo sapiens
ggtgcccaacacgtcgagggcagtc

SEQ ID NO: 23697 - DNA, 25 bp, Homo sapiens
tagtgctatggggctcttttgtaaa

SEQ ID NO: 23698 - DNA, 25 bp, Homo sapiens
tgtacgtcaatgactgaccacccca

SEQ ID NO: 23699 - DNA, 25 bp, Homo sapiens
agggataggacttgagtctaatcct

SEQ ID NO: 23700 - DNA, 25 bp, Homo sapiens
ccaggaatctggttagctttgctta

SEQ ID NO: 23701 - DNA, 25 bp, Homo sapiens
gagcaaatggttctttacgtctaca

SEQ ID NO: 23702 - DNA, 25 bp, Homo sapiens
gagtctaatcctaactcttagcagt

SEQ ID NO: 23703 - DNA, 25 bp, Homo sapiens
gatgtaataatttccatatcaacta

SEQ ID NO: 23704 - DNA, 25 bp, Homo sapiens
gatgtacagtgctaattccaatgaa

SEQ ID NO: 23705 - DNA, 25 bp, Homo sapiens
gcagttacactggatgacattagag

SEQ ID NO: 23706 - DNA, 25 bp, Homo sapiens
gcatgagtacagtcactagtagcat

SEQ ID NO: 23707 - DNA, 25 bp, Homo sapiens
tctggttagctttgcttaacacatt

SEQ ID NO: 23708 - DNA, 25 bp, Homo sapiens
tgatgcgtaatactccaggaatctg

SEQ ID NO: 23709 - DNA, 25 bp, Homo sapiens
tggttctttacgtctacattttctt

SEQ ID NO: 23710 - DNA, 25 bp, Homo sapiens
aatacccacactataggactgcaac

SEQ ID NO: 23711 - DNA, 25 bp, Homo sapiens
gaaggatcctgtatttggtaaattt

SEQ ID NO: 23712 - DNA, 25 bp, Homo sapiens
gacagagttgcctggccttattctt

SEQ ID NO: 23713 - DNA, 25 bp, Homo sapiens
gactagagacagagttgcctggcct

SEQ ID NO: 23714 - DNA, 25 bp, Homo sapiens
gagccctagtgattagaagacttca

SEQ ID NO: 23715 - DNA, 25 bp, Homo sapiens
ggactgcaacaaaatacagagccct

SEQ ID NO: 23716 - DNA, 25 bp, Homo sapiens
ggtgcttagtaaggtgctcaaggac

SEQ ID NO: 23717 - DNA, 25 bp, Homo sapiens
gtccacaacattgactggtgcttag

SEQ ID NO: 23718 - DNA, 25 bp, Homo sapiens
tatatccccattgtccacaacattg

SEQ ID NO: 23719 - DNA, 25 bp, Homo sapiens
tgcctttttggcagtatcctttctg

SEQ ID NO: 23720 - DNA, 25 bp, Homo sapiens
tggccttattctttaaatacccaca

SEQ ID NO: 23721 - DNA, 25 bp, Homo sapiens
actgctcaggcgtgaggctggatcg

SEQ ID NO: 23722 - DNA, 25 bp, Homo sapiens
agagcttttaactcggacatcaccc

SEQ ID NO: 23723 - DNA, 25 bp, Homo sapiens
cccttgcccaaagatcctttgctga

SEQ ID NO: 23724 - DNA, 25 bp, Homo sapiens
gaaagctggagcctgacgtcagagc

SEQ ID NO: 23725 - DNA, 25 bp, Homo sapiens
gaagctgcgggctaggaggctggaa

SEQ ID NO: 23726 - DNA, 25 bp, Homo sapiens
gaggggctctgcaactgagcgaagc

SEQ ID NO: 23727 - DNA, 25 bp, Homo sapiens
gctcatacgggcagactgctcaggc

SEQ ID NO: 23728 - DNA, 25 bp, Homo sapiens
ggctggatcgtagggttcgaggctg

SEQ ID NO: 23729 - DNA, 25 bp, Homo sapiens
tcagccagatccttacacgtggagc

SEQ ID NO: 23730 - DNA, 25 bp, Homo sapiens
tcctttgctgagtgttctgtttttg

SEQ ID NO: 23731 - DNA, 25 bp, Homo sapiens
ttcgaggctgcttgcttttgttgtt

SEQ ID NO: 23732 - DNA, 25 bp, Homo sapiens
aaagactagactacataggctccta

SEQ ID NO: 23733 - DNA, 25 bp, Homo sapiens
accagctctcataagggcataacca

SEQ ID NO: 23734 - DNA, 25 bp, Homo sapiens
caattaaaatcagtgtgaaccccca

SEQ ID NO: 23735 - DNA, 25 bp, Homo sapiens
gagatatgtagggccaatgagttgg

SEQ ID NO: 23736 - DNA, 25 bp, Homo sapiens
gatgtataaacctattcagactagc

SEQ ID NO: 23737 - DNA, 25 bp, Homo sapiens
ggaatatggcaatcaaccagctctc

SEQ ID NO: 23738 - DNA, 25 bp, Homo sapiens
ggacccgtggataatttcacaggat

SEQ ID NO: 23739 - DNA, 25 bp, Homo sapiens
ggcccatcgtctgtcataaatgttg

SEQ ID NO: 23740 - DNA, 25 bp, Homo sapiens
gtattctatttcaaggacccgtgga

SEQ ID NO: 23741 - DNA, 25 bp, Homo sapiens
tgggagtaaatcctggcccatcgtc

SEQ ID NO: 23742 - DNA, 25 bp, Homo sapiens
tggtgagcatatcatgtgaggatca

SEQ ID NO: 23743 - DNA, 25 bp, Homo sapiens
agaaatcgatgcaacatttctttcc

SEQ ID NO: 23744 - DNA, 25 bp, Homo sapiens
caatccaagagcaaactcagtggtg

SEQ ID NO: 23745 - DNA, 25 bp, Homo sapiens
catttctgtgcacatgttggtggaa

SEQ ID NO: 23746 - DNA, 25 bp, Homo sapiens
cccacttttttctgcatgactagct

SEQ ID NO: 23747 - DNA, 25 bp, Homo sapiens
ctctatcccccaaacatgctggaag

SEQ ID NO: 23748 - DNA, 25 bp, Homo sapiens
gacagaccttagcaagatgggccag

SEQ ID NO: 23749 - DNA, 25 bp, Homo sapiens
gacttatatttggcttcaatccaag

SEQ ID NO: 23750 - DNA, 25 bp, Homo sapiens
ggcatcagcttatgagaacccactt

SEQ ID NO: 23751 - DNA, 25 bp, Homo sapiens
tcagtggtgaacagctccatttctg

SEQ ID NO: 23752 - DNA, 25 bp, Homo sapiens
tttcctgtctgggctgtttgtataa

SEQ ID NO: 23753 - DNA, 25 bp, Homo sapiens
tttctgcatgactagcttgtaagga

SEQ ID NO: 23754 - DNA, 25 bp, Homo sapiens
aagttacagaggctcttaacgtgtt

SEQ ID NO: 23755 - DNA, 25 bp, Homo sapiens
agtgcctgtaggactgagccagtgc

SEQ ID NO: 23756 - DNA, 25 bp, Homo sapiens
atcatcaccatgtgcatactctaga

SEQ ID NO: 23757 - DNA, 25 bp, Homo sapiens
caacccaacacatcatcaccatgtg

SEQ ID NO: 23758 - DNA, 25 bp, Homo sapiens
gaacaggtatcaagaactttcttta

SEQ ID NO: 23759 - DNA, 25 bp, Homo sapiens
gatttcaaatatgttctacggcctt

SEQ ID NO: 23760 - DNA, 25 bp, Homo sapiens
gccagtgctttatcaacccaacaca

SEQ ID NO: 23761 - DNA, 25 bp, Homo sapiens
ggactgagccagtgctttatcaacc

SEQ ID NO: 23762 - DNA, 25 bp, Homo sapiens
gtatccattgaagtttagtgcctgt

SEQ ID NO: 23763 - DNA, 25 bp, Homo sapiens
tcaaatatgttctacggccttactg

SEQ ID NO: 23764 - DNA, 25 bp, Homo sapiens
tgtaacttagcattccaatttctca

SEQ ID NO: 23765 - DNA, 25 bp, Homo sapiens
aatgtaatgttttagtgcctcagta

SEQ ID NO: 23766 - DNA, 25 bp, Homo sapiens
acaggtccaccatatttgaattcat

SEQ ID NO: 23767 - DNA, 25 bp, Homo sapiens
ataaacttccaaacaggtccaccat

SEQ ID NO: 23768 - DNA, 25 bp, Homo sapiens
atctctatgtagaaatctcatcttt

SEQ ID NO: 23769 - DNA, 25 bp, Homo sapiens
gaactgtggaatcatcacttgtgtc

SEQ ID NO: 23770 - DNA, 25 bp, Homo sapiens
gaattcattaccttggagaccccta

SEQ ID NO: 23771 - DNA, 25 bp, Homo sapiens
ggaaagtggcacagggttccataac

SEQ ID NO: 23772 - DNA, 25 bp, Homo sapiens
ggagagtataggtgtgtagctacaa

SEQ ID NO: 23773 - DNA, 25 bp, Homo sapiens
gtccaaggaagaaggttcactgttg

SEQ ID NO: 23774 - DNA, 25 bp, Homo sapiens
gtgcctcagtaattattagcattga

SEQ ID NO: 23775 - DNA, 25 bp, Homo sapiens
tgcagcactcaccttaacttaaaat

SEQ ID NO: 23776 - DNA, 25 bp, Homo sapiens
aacactcttgctttattccagaatg

SEQ ID NO: 23777 - DNA, 25 bp, Homo sapiens
acactgatgcttagatgttccagta

SEQ ID NO: 23778 - DNA, 25 bp, Homo sapiens
agtgggcttgattctgcagtaaatc

SEQ ID NO: 23779 - DNA, 25 bp, Homo sapiens
cacagtagtcttgatgaccaaagtc

SEQ ID NO: 23780 - DNA, 25 bp, Homo sapiens
cagtaaatcttttacaactgcctcg

SEQ ID NO: 23781 - DNA, 25 bp, Homo sapiens
catagtaacttcttatggaattgat

SEQ ID NO: 23782 - DNA, 25 bp, Homo sapiens
ctactgtgtgtgtgaatgaacactc

SEQ ID NO: 23783 - DNA, 25 bp, Homo sapiens
ggaacaaacagatcgaacagttttg

SEQ ID NO: 23784 - DNA, 25 bp, Homo sapiens
gtaatctaatatggccacagtagtc

SEQ ID NO: 23785 - DNA, 25 bp, Homo sapiens
gtcctaagcctaaaagtgggcttga

SEQ ID NO: 23786 - DNA, 25 bp, Homo sapiens
tattccagaatgctgtacatctatt

SEQ ID NO: 23787 - DNA, 25 bp, Homo sapiens
tgctgtacatctattttggattgta

SEQ ID NO: 23788 - DNA, 25 bp, Homo sapiens
ttcacaaacttttatactctttctg

SEQ ID NO: 23789 - DNA, 25 bp, Homo sapiens
tttacgctttgattcatagtaactt

SEQ ID NO: 23790 - DNA, 25 bp, Homo sapiens
tttccatctttagaaaactacatgg

SEQ ID NO: 23791 - DNA, 25 bp, Homo sapiens
aactcttcgtacattcaatgcatgg

SEQ ID NO: 23792 - DNA, 25 bp, Homo sapiens
aagagtcccatctgctatgcccagc

SEQ ID NO: 23793 - DNA, 25 bp, Homo sapiens
aatacatcagcgacctgaagctgaa

SEQ ID NO: 23794 - DNA, 25 bp, Homo sapiens
accctggaggccacctcttctaaga

SEQ ID NO: 23795 - DNA, 25 bp, Homo sapiens
atagttgactattctgaaaccagcc

SEQ ID NO: 23796 - DNA, 25 bp, Homo sapiens
atcaatcagtgtgattagctttctc

SEQ ID NO: 23797 - DNA, 25 bp, Homo sapiens
cagcagacattgtgccatatgtatc

SEQ ID NO: 23798 - DNA, 25 bp, Homo sapiens
catcagcgacctgaagctgaatgcc

SEQ ID NO: 23799 - DNA, 25 bp, Homo sapiens
cccagtgaacttggtgggcccagga

SEQ ID NO: 23800 - DNA, 25 bp, Homo sapiens
ccctggaggccacctcttctaagag

SEQ ID NO: 23801 - DNA, 25 bp, Homo sapiens
cctaaccaagagaggccggcagatc

SEQ ID NO: 23802 - DNA, 25 bp, Homo sapiens
cgtacattcaatgcatggatcaatc

SEQ ID NO: 23803 - DNA, 25 bp, Homo sapiens
ctaagagtcccatctgctatgccca

SEQ ID NO: 23804 - DNA, 25 bp, Homo sapiens
ctttattgaatggttttgctcagca

SEQ ID NO: 23805 - DNA, 25 bp, Homo sapiens
gtcatcctcctaaccaagagaggcc

SEQ ID NO: 23806 - DNA, 25 bp, Homo sapiens
ttcaatgcatggatcaatcagtgtg

SEQ ID NO: 23807 - DNA, 25 bp, Homo sapiens
aacagaggtgccaggcctcagcctc

SEQ ID NO: 23808 - DNA, 25 bp, Homo sapiens
acccagcagtagacacagtgcacag

SEQ ID NO: 23809 - DNA, 25 bp, Homo sapiens
atttgaatagctcaggtgtgctgac

SEQ ID NO: 23810 - DNA, 25 bp, Homo sapiens
cacccagcagtagacacagtgcaca

SEQ ID NO: 23811 - DNA, 25 bp, Homo sapiens
cagtagacacagtgcacaggggaga

SEQ ID NO: 23812 - DNA, 25 bp, Homo sapiens
ccccagtgaagacaccagataggac

SEQ ID NO: 23813 - DNA, 25 bp, Homo sapiens
ccccatcgccaaaggatggaagtaa

SEQ ID NO: 23814 - DNA, 25 bp, Homo sapiens
ccttgcttctaccatgagcagagac

SEQ ID NO: 23815 - DNA, 25 bp, Homo sapiens
gcctgtatgccttgcttctaccatg

SEQ ID NO: 23816 - DNA, 25 bp, Homo sapiens
gctgggctgtggattcctgatcccc

SEQ ID NO: 23817 - DNA, 25 bp, Homo sapiens
gggatctcagagcttacaggctgag

SEQ ID NO: 23818 - DNA, 25 bp, Homo sapiens
tagacacagtgcacaggggagaaga

SEQ ID NO: 23819 - DNA, 25 bp, Homo sapiens
tccacccagcagtagacacagtgca

SEQ ID NO: 23820 - DNA, 25 bp, Homo sapiens
tgggctgtggattcctgatcccctc

SEQ ID NO: 23821 - DNA, 25 bp, Homo sapiens
tgtatgccttgcttctaccatgagc

SEQ ID NO: 23822 - DNA, 25 bp, Homo sapiens
ttgggggcctgtatgccttgcttct

SEQ ID NO: 23823 - DNA, 25 bp, Homo sapiens
aaagcatgtctgctgggtgtgacca

SEQ ID NO: 23824 - DNA, 25 bp, Homo sapiens
aagcatgtctgctgggtgtgaccat

SEQ ID NO: 23825 - DNA, 25 bp, Homo sapiens
atgtctgctgggtgtgaccatgttt

SEQ ID NO: 23826 - DNA, 25 bp, Homo sapiens
ctgctgggtgtgaccatgtttcctc

SEQ ID NO: 23827 - DNA, 25 bp, Homo sapiens
gaaagcatgtctgctgggtgtgacc

SEQ ID NO: 23828 - DNA, 25 bp, Homo sapiens
gggtgtgaccatgtttcctctcaat

SEQ ID NO: 23829 - DNA, 25 bp, Homo sapiens
ggtgtgaccatgtttcctctcaata

SEQ ID NO: 23830 - DNA, 25 bp, Homo sapiens
gtgaccatgtttcctctcaataaag

SEQ ID NO: 23831 - DNA, 25 bp, Homo sapiens
gtgtgaccatgtttcctctcaataa

SEQ ID NO: 23832 - DNA, 25 bp, Homo sapiens
tctgctgggtgtgaccatgtttcct

SEQ ID NO: 23833 - DNA, 25 bp, Homo sapiens
tgctgggtgtgaccatgtttcctct

SEQ ID NO: 23834 - DNA, 25 bp, Homo sapiens
tgggtgtgaccatgtttcctctcaa

SEQ ID NO: 23835 - DNA, 25 bp, Homo sapiens
tgtctgctgggtgtgaccatgtttc

SEQ ID NO: 23836 - DNA, 25 bp, Homo sapiens
agcatgtctgctgggtgtgaccatg

SEQ ID NO: 23837 - DNA, 25 bp, Homo sapiens
catgtctgctgggtgtgaccatgtt

SEQ ID NO: 23838 - DNA, 25 bp, Homo sapiens
catgtttcctctcaataaagttccc

SEQ ID NO: 23839 - DNA, 25 bp, Homo sapiens
ccatgtttcctctcaataaagttcc

SEQ ID NO: 23840 - DNA, 25 bp, Homo sapiens
ctcaataaagttcccctgtgacact

SEQ ID NO: 23841 - DNA, 25 bp, Homo sapiens
ctctcaataaagttcccctgtgaca

SEQ ID NO: 23842 - DNA, 25 bp, Homo sapiens
gaccatgtttcctctcaataaagtt

SEQ ID NO: 23843 - DNA, 25 bp, Homo sapiens
gcatgtctgctgggtgtgaccatgt

SEQ ID NO: 23844 - DNA, 25 bp, Homo sapiens
ggaaagcatgtctgctgggtgtgac

SEQ ID NO: 23845 - DNA, 25 bp, Homo sapiens
gtttcctctcaataaagttcccctg

SEQ ID NO: 23846 - DNA, 25 bp, Homo sapiens
taaagttcccctgtgacactcaaaa

SEQ ID NO: 23847 - DNA, 25 bp, Homo sapiens
tcaataaagttcccctgtgacactc

SEQ ID NO: 23848 - DNA, 25 bp, Homo sapiens
tgaccatgtttcctctcaataaagt

SEQ ID NO: 23849 - DNA, 25 bp, Homo sapiens
tgtgaccatgtttcctctcaataaa

SEQ ID NO: 23850 - DNA, 25 bp, Homo sapiens
ttcctctcaataaagttcccctgtg

SEQ ID NO: 23851 - DNA, 25 bp, Homo sapiens
aaggagtggtcaagcccttgcccag

SEQ ID NO: 23852 - DNA, 25 bp, Homo sapiens
agttcactttcaattgcttctgtgc

SEQ ID NO: 23853 - DNA, 25 bp, Homo sapiens
cagatgaccgcaataatgaatgagc

SEQ ID NO: 23854 - DNA, 25 bp, Homo sapiens
ccccaggcgatggacaattatgata

SEQ ID NO: 23855 - DNA, 25 bp, Homo sapiens
cgcactttccactggagttcacttt

SEQ ID NO: 23856 - DNA, 25 bp, Homo sapiens
ctctatgtgcaactgacagatgacc

SEQ ID NO: 23857 - DNA, 25 bp, Homo sapiens
gccactgaattatgccagggcgcac

SEQ ID NO: 23858 - DNA, 25 bp, Homo sapiens
gccagggcgcactttccactggagt

SEQ ID NO: 23859 - DNA, 25 bp, Homo sapiens
gcttgagatgtcttaacctattccc

SEQ ID NO: 23860 - DNA, 25 bp, Homo sapiens
tattgcctctatgtgcaactgacag

SEQ ID NO: 23861 - DNA, 25 bp, Homo sapiens
tctctattctggaagagcggtccag

SEQ ID NO: 23862 - DNA, 25 bp, Homo sapiens
tgcaactgacagatgaccgcaataa

SEQ ID NO: 23863 - DNA, 25 bp, Homo sapiens
tgcttctgtgcaataaaaccaagtg

SEQ ID NO: 23864 - DNA, 25 bp, Homo sapiens
tgcttgagatgtcttaacctattcc

SEQ ID NO: 23865 - DNA, 25 bp, Homo sapiens
aagcagctaaaccaaaagaagcctc

SEQ ID NO: 23866 - DNA, 25 bp, Homo sapiens
atcaccaggttgtagaagttgacag

SEQ ID NO: 23867 - DNA, 25 bp, Homo sapiens
atgtaggggccaagcagtgcccagc

SEQ ID NO: 23868 - DNA, 25 bp, Homo sapiens
caaactggactctcaggacaaaacg

SEQ ID NO: 23869 - DNA, 25 bp, Homo sapiens
caccaggttgtagaagttgacaggc

SEQ ID NO: 23870 - DNA, 25 bp, Homo sapiens
cagatacaaactggactctcaggac

SEQ ID NO: 23871 - DNA, 25 bp, Homo sapiens
ggttgatgccagacatcaccaggtt

SEQ ID NO: 23872 - DNA, 25 bp, Homo sapiens
gtcaataaagttacccttgtacttg

SEQ ID NO: 23873 - DNA, 25 bp, Homo sapiens
gtgacacgtctcagccttagccctg

SEQ ID NO: 23874 - DNA, 25 bp, Homo sapiens
taatcggctcactataggaatttgc

SEQ ID NO: 23875 - DNA, 25 bp, Homo sapiens
tcaggacaaaacgacaccagccaaa

SEQ ID NO: 23876 - DNA, 25 bp, Homo sapiens
tgtaggggccaagcagtgcccagct

SEQ ID NO: 23877 - DNA, 25 bp, Homo sapiens
ttcagttgaggtgacacgtctcagc

SEQ ID NO: 23878 - DNA, 25 bp, Homo sapiens
ttccttttcttcgtggccaatgcca

SEQ ID NO: 23879 - DNA, 25 bp, Homo sapiens
ttctgcttcagttgaggtgacacgt

SEQ ID NO: 23880 - DNA, 25 bp, Homo sapiens
ttcttcgtggccaatgccataatcc

SEQ ID NO: 23881 - DNA, 25 bp, Homo sapiens
aaattccgcaaactccagcatgagc

SEQ ID NO: 23882 - DNA, 25 bp, Homo sapiens
acacacctgcctgatgctatcaaga

SEQ ID NO: 23883 - DNA, 25 bp, Homo sapiens
agaggttcacacaaaaatcagtgca

SEQ ID NO: 23884 - DNA, 25 bp, Homo sapiens
caagaatgttctcaggctgcaggac

SEQ ID NO: 23885 - DNA, 25 bp, Homo sapiens
cacacctgcctgatgctatcaagag

SEQ ID NO: 23886 - DNA, 25 bp, Homo sapiens
cacctaccagactgaagaagatcgc

SEQ ID NO: 23887 - DNA, 25 bp, Homo sapiens
cagagtaaacacacctgcctgatgc

SEQ ID NO: 23888 - DNA, 25 bp, Homo sapiens
cctgatgctatcaagaggctgaaga

SEQ ID NO: 23889 - DNA, 25 bp, Homo sapiens
ctgcctgatgctatcaagaggctga

SEQ ID NO: 23890 - DNA, 25 bp, Homo sapiens
gacctgcagcatcgtctagatgagg

SEQ ID NO: 23891 - DNA, 25 bp, Homo sapiens
gcagagtaaacacacctgcctgatg

SEQ ID NO: 23892 - DNA, 25 bp, Homo sapiens
tgaggaacaatccaatgctaatcta

SEQ ID NO: 23893 - DNA, 25 bp, Homo sapiens
tgcctgatgctatcaagaggctgaa

SEQ ID NO: 23894 - DNA, 25 bp, Homo sapiens
tggtcacttgctttatgacgtttat

SEQ ID NO: 23895 - DNA, 25 bp, Homo sapiens
ttggtcacttgctttatgacgttta

SEQ ID NO: 23896 - DNA, 25 bp, Homo sapiens
aaccctgccgatattgagtccctgc

SEQ ID NO: 23897 - DNA, 25 bp, Homo sapiens
aggatccatgggagcattctcaaag

SEQ ID NO: 23898 - DNA, 25 bp, Homo sapiens
agttccaggatccatgggagcattc

SEQ ID NO: 23899 - DNA, 25 bp, Homo sapiens
attctgcaggttcatctcagaccca

SEQ ID NO: 23900 - DNA, 25 bp, Homo sapiens
cacaggatggccaggcagattcagc

SEQ ID NO: 23901 - DNA, 25 bp, Homo sapiens
caccaccgagccatggcaggatcgg

SEQ ID NO: 23902 - DNA, 25 bp, Homo sapiens
cagcctgtgccttgctgccacagta

SEQ ID NO: 23903 - DNA, 25 bp, Homo sapiens
catgggagcattctcaaaggcttta

SEQ ID NO: 23904 - DNA, 25 bp, Homo sapiens
ccctgcttgctgactggctcgaagg

SEQ ID NO: 23905 - DNA, 25 bp, Homo sapiens
ggccaggcagattcagcctctctct

SEQ ID NO: 23906 - DNA, 25 bp, Homo sapiens
ggccatggcatgaaccctgccgata

SEQ ID NO: 23907 - DNA, 25 bp, Homo sapiens
tcggcttggattattctgcaggttc

SEQ ID NO: 23908 - DNA, 25 bp, Homo sapiens
tggattattctgcaggttcatctca

SEQ ID NO: 23909 - DNA, 25 bp, Homo sapiens
tggccaggcagattcagcctctctc

SEQ ID NO: 23910 - DNA, 25 bp, Homo sapiens
tggctacggtgttggctttgacctg

SEQ ID NO: 23911 - DNA, 25 bp, Homo sapiens
ttcagccttaagcagccacctgagc

SEQ ID NO: 23912 - DNA, 25 bp, Homo sapiens
agaaggagtgccataccttctccca

SEQ ID NO: 23913 - DNA, 25 bp, Homo sapiens
atagttgtctgtgcttccttggttc

SEQ ID NO: 23914 - DNA, 25 bp, Homo sapiens
caagagcaggaggtgcctgaaagct

SEQ ID NO: 23915 - DNA, 25 bp, Homo sapiens
ccaagagcaggaggtgcctgaaagc

SEQ ID NO: 23916 - DNA, 25 bp, Homo sapiens
ccccaggcagaaatagttgtctgtg

SEQ ID NO: 23917 - DNA, 25 bp, Homo sapiens
cctcagcaggccaaacatggccaga

SEQ ID NO: 23918 - DNA, 25 bp, Homo sapiens
cgaggacctggcaggcaatgcagcc

SEQ ID NO: 23919 - DNA, 25 bp, Homo sapiens
ctctgccccaagagcaggaggtgcc

SEQ ID NO: 23920 - DNA, 25 bp, Homo sapiens
gacctggcaggcaatgcagcctctc

SEQ ID NO: 23921 - DNA, 25 bp, Homo sapiens
gcttccttggttcatgcttctactg

SEQ ID NO: 23922 - DNA, 25 bp, Homo sapiens
tcccccaggcagaaatagttgtctg

SEQ ID NO: 23923 - DNA, 25 bp, Homo sapiens
tcctctgaggaggaaccggaggtct

SEQ ID NO: 23924 - DNA, 25 bp, Homo sapiens
tgaggccccaactcaagtgtcacct

SEQ ID NO: 23925 - DNA, 25 bp, Homo sapiens
tgcctggcaacatcttacttgtcct

SEQ ID NO: 23926 - DNA, 25 bp, Homo sapiens
tggcaacatcttacttgtcctttga

SEQ ID NO: 23927 - DNA, 25 bp, Homo sapiens
ttgctgtgtagttccctctgcctgg

SEQ ID NO: 23928 - DNA, 25 bp, Homo sapiens
acccccatgcactcaaagattggat

SEQ ID NO: 23929 - DNA, 25 bp, Homo sapiens
agatgctctgctgcttgagagctat

SEQ ID NO: 23930 - DNA, 25 bp, Homo sapiens
agggtggacactgcacgctctggca

SEQ ID NO: 23931 - DNA, 25 bp, Homo sapiens
agtcctagggtgattctatttctgc

SEQ ID NO: 23932 - DNA, 25 bp, Homo sapiens
cagcaattccccagcgtagtcaagg

SEQ ID NO: 23933 - DNA, 25 bp, Homo sapiens
ccactgctttacaggacagggggtt

SEQ ID NO: 23934 - DNA, 25 bp, Homo sapiens
cgaccgggcaagctttcttcctcga

SEQ ID NO: 23935 - DNA, 25 bp, Homo sapiens
ctgcttgagagctattgctttgtta

SEQ ID NO: 23936 - DNA, 25 bp, Homo sapiens
gggaacatacagaactctaaaagat

SEQ ID NO: 23937 - DNA, 25 bp, Homo sapiens
tagtcaagggtggacactgcacgct

SEQ ID NO: 23938 - DNA, 25 bp, Homo sapiens
tcctcgagatgctctgctgcttgag

SEQ ID NO: 23939 - DNA, 25 bp, Homo sapiens
tctgctgcttgagagctattgcttt

SEQ ID NO: 23940 - DNA, 25 bp, Homo sapiens
tctttctgtaaggtggacttccagc

SEQ ID NO: 23941 - DNA, 25 bp, Homo sapiens
tgtaaggtggacttccagcttttga

SEQ ID NO: 23942 - DNA, 25 bp, Homo sapiens
tttgtctttctgtaaggtggacttc

SEQ ID NO: 23943 - DNA, 25 bp, Homo sapiens
acaacagagccttgaccacgtggag

SEQ ID NO: 23944 - DNA, 25 bp, Homo sapiens
actgccaagaacttaaatgactggt

SEQ ID NO: 23945 - DNA, 25 bp, Homo sapiens
agtcttcccaaggattgagttatgg

SEQ ID NO: 23946 - DNA, 25 bp, Homo sapiens
attgacaaacaacagagccttgacc

SEQ ID NO: 23947 - DNA, 25 bp, Homo sapiens
cacacgaaccttgtggggctgtgaa

SEQ ID NO: 23948 - DNA, 25 bp, Homo sapiens
cccagcagagcagatctgctttttt

SEQ ID NO: 23949 - DNA, 25 bp, Homo sapiens
cctggactgcccaggtctataagcc

SEQ ID NO: 23950 - DNA, 25 bp, Homo sapiens
cttgtttgccacatggagagagact

SEQ ID NO: 23951 - DNA, 25 bp, Homo sapiens
gagtgagacatcttcttgctgctgg

SEQ ID NO: 23952 - DNA, 25 bp, Homo sapiens
gattgacaaacaacagagccttgac

SEQ ID NO: 23953 - DNA, 25 bp, Homo sapiens
taaatatgttgttactgccaagaac

SEQ ID NO: 23954 - DNA, 25 bp, Homo sapiens
tcagccttgtctggaaccagatcta

SEQ ID NO: 23955 - DNA, 25 bp, Homo sapiens
tcccaaggattgagttatggacttt

SEQ ID NO: 23956 - DNA, 25 bp, Homo sapiens
ttgccccagcagagcagatctgctt

SEQ ID NO: 23957 - DNA, 25 bp, Homo sapiens
tttccaagctgagaggacgtgaacc

SEQ ID NO: 23958 - DNA, 25 bp, Homo sapiens
ttttccacacgaaccttgtggggct

SEQ ID NO: 23959 - DNA, 25 bp, Homo sapiens
aaccataactgtatcttcctgagag

SEQ ID NO: 23960 - DNA, 25 bp, Homo sapiens
aattatgctgtactctcagcatcag

SEQ ID NO: 23961 - DNA, 25 bp, Homo sapiens
actgtatcttcctgagagatggatt

SEQ ID NO: 23962 - DNA, 25 bp, Homo sapiens
ataactgtatcttcctgagagatgg

SEQ ID NO: 23963 - DNA, 25 bp, Homo sapiens
atgctgtactctcagcatcagatac

SEQ ID NO: 23964 - DNA, 25 bp, Homo sapiens
catacgttaatggatggagtctaca

SEQ ID NO: 23965 - DNA, 25 bp, Homo sapiens
ccaaatgacatgcaaggatttttct

SEQ ID NO: 23966 - DNA, 25 bp, Homo sapiens
ctctagtctgtggaaacgttctttt

SEQ ID NO: 23967 - DNA, 25 bp, Homo sapiens
gaatgagtcctttccatggaggatt

SEQ ID NO: 23968 - DNA, 25 bp, Homo sapiens
gactgcaacaagaaccaaatgacat

SEQ ID NO: 23969 - DNA, 25 bp, Homo sapiens
gatttcactttcatacgttaatgga

SEQ ID NO: 23970 - DNA, 25 bp, Homo sapiens
gctgtactctcagcatcagatacat

SEQ ID NO: 23971 - DNA, 25 bp, Homo sapiens
ggaatcattcatcagaactgctttt

SEQ ID NO: 23972 - DNA, 25 bp, Homo sapiens
gtatcttcctgagagatggatttca

SEQ ID NO: 23973 - DNA, 25 bp, Homo sapiens
ttcactttcatacgttaatggatgg

SEQ ID NO: 23974 - DNA, 25 bp, Homo sapiens
ttttcttggatctctagtctgtgga

SEQ ID NO: 23975 - DNA, 25 bp, Homo sapiens
aagtgaatcatttgttcttgcctta

SEQ ID NO: 23976 - DNA, 25 bp, Homo sapiens
accactttaggtgatgaatctttac

SEQ ID NO: 23977 - DNA, 25 bp, Homo sapiens
agatcttggcccaaaccagcccagg

SEQ ID NO: 23978 - DNA, 25 bp, Homo sapiens
caaagcttaccactttaggtgatga

SEQ ID NO: 23979 - DNA, 25 bp, Homo sapiens
catttatctggcatcatcagagtac

SEQ ID NO: 23980 - DNA, 25 bp, Homo sapiens
ctattttagcccttttttgatgaga

SEQ ID NO: 23981 - DNA, 25 bp, Homo sapiens
cttgccttattaaacagagtagatg

SEQ ID NO: 23982 - DNA, 25 bp, Homo sapiens
gaaattgttagtgtctcagtaatcc

SEQ ID NO: 23983 - DNA, 25 bp, Homo sapiens
gatatccaaagcttaccactttagg

SEQ ID NO: 23984 - DNA, 25 bp, Homo sapiens
gcatcatcagagtactaacatgttt

SEQ ID NO: 23985 - DNA, 25 bp, Homo sapiens
gtaacaatgtgttttcttgcctaaa

SEQ ID NO: 23986 - DNA, 25 bp, Homo sapiens
tccttacttgaaatgggtctgtatt

SEQ ID NO: 23987 - DNA, 25 bp, Homo sapiens
tcttgccttattaaacagagtagat

SEQ ID NO: 23988 - DNA, 25 bp, Homo sapiens
ttaccactttaggtgatgaatcttt

SEQ ID NO: 23989 - DNA, 25 bp, Homo sapiens
ttgttagtgtctcagtaatcctgat

SEQ ID NO: 23990 - DNA, 25 bp, Homo sapiens
tttagcccttttttgatgagactat

SEQ ID NO: 23991 - DNA, 25 bp, Homo sapiens
aaacttgcacgtgtccctgaattcc

SEQ ID NO: 23992 - DNA, 25 bp, Homo sapiens
acagggctgattcttgattcccaat

SEQ ID NO: 23993 - DNA, 25 bp, Homo sapiens
acgctgcatatacaggtaccattta

SEQ ID NO: 23994 - DNA, 25 bp, Homo sapiens
caacccattttgtgccacatgcaag

SEQ ID NO: 23995 - DNA, 25 bp, Homo sapiens
ccattttgtgccacatgcaagtttt

SEQ ID NO: 23996 - DNA, 25 bp, Homo sapiens
gggctgattcttgattcccaattct

SEQ ID NO: 23997 - DNA, 25 bp, Homo sapiens
gtacagttctatactgttatctgtg

SEQ ID NO: 23998 - DNA, 25 bp, Homo sapiens
gtccatttccaaaacttgcacgtgt

SEQ ID NO: 23999 - DNA, 25 bp, Homo sapiens
gtgccacatgcaagttttgaataag

SEQ ID NO: 24000 - DNA, 25 bp, Homo sapiens
gttctatactgttatctgtgtccat

SEQ ID NO: 24001 - DNA, 25 bp, Homo sapiens
tgctcattctcatccatccaggatg

SEQ ID NO: 24002 - DNA, 25 bp, Homo sapiens
ttgtgtacagttctatactgttatc

SEQ ID NO: 24003 - DNA, 25 bp, Homo sapiens
tttccaaaacttgcacgtgtccctg

SEQ ID NO: 24004 - DNA, 25 bp, Homo sapiens
ttttgtgccacatgcaagttttgaa

SEQ ID NO: 24005 - DNA, 25 bp, Homo sapiens
aaagggcagcaatgaccctcaatgg

SEQ ID NO: 24006 - DNA, 25 bp, Homo sapiens
aaagttcttgagcttattcagaagc

SEQ ID NO: 24007 - DNA, 25 bp, Homo sapiens
aagttcttgagcttattcagaagct

SEQ ID NO: 24008 - DNA, 25 bp, Homo sapiens
actgccagtcagcaagggaagaaaa

SEQ ID NO: 24009 - DNA, 25 bp, Homo sapiens
agggcaaagctgtttaagggccact

SEQ ID NO: 24010 - DNA, 25 bp, Homo sapiens
agtcagaggttcagactcttccagt

SEQ ID NO: 24011 - DNA, 25 bp, Homo sapiens
ctggatctgcaatctgaatgctact

SEQ ID NO: 24012 - DNA, 25 bp, Homo sapiens
gaaacagtcacatgaccccagtcac

SEQ ID NO: 24013 - DNA, 25 bp, Homo sapiens
gaaatgggcttcctctcttcttctc

SEQ ID NO: 24014 - DNA, 25 bp, Homo sapiens
gatctgcaatctgaatgctactcat

SEQ ID NO: 24015 - DNA, 25 bp, Homo sapiens
gccatccatgggatgagtcagaggt

SEQ ID NO: 24016 - DNA, 25 bp, Homo sapiens
ggatctgcaatctgaatgctactca

SEQ ID NO: 24017 - DNA, 25 bp, Homo sapiens
tcccctgggcataggccatagggat

SEQ ID NO: 24018 - DNA, 25 bp, Homo sapiens
tggatctgcaatctgaatgctactc

SEQ ID NO: 24019 - DNA, 25 bp, Homo sapiens
ttcttctcacacctcactggctgga

SEQ ID NO: 24020 - DNA, 25 bp, Homo sapiens
tttaagtcccatcttcccctgggca

SEQ ID NO: 24021 - DNA, 25 bp, Homo sapiens
acctgctgctacatcatgaagatag

SEQ ID NO: 24022 - DNA, 25 bp, Homo sapiens
aggtgccgctctactacatctagga

SEQ ID NO: 24023 - DNA, 25 bp, Homo sapiens
ccctgtgtggcgaggtgccgctcta

SEQ ID NO: 24024 - DNA, 25 bp, Homo sapiens
cctgtgtggcgaggtgccgctctac

SEQ ID NO: 24025 - DNA, 25 bp, Homo sapiens
ctgtgtggcgaggtgccgctctact

SEQ ID NO: 24026 - DNA, 25 bp, Homo sapiens
gagcatccccagtcttgaggctctc

SEQ ID NO: 24027 - DNA, 25 bp, Homo sapiens
gaggtgccgctctactacatctagg

SEQ ID NO: 24028 - DNA, 25 bp, Homo sapiens
gcgaggtgccgctctactacatcta

SEQ ID NO: 24029 - DNA, 25 bp, Homo sapiens
ggcaaagggtcttttgcagcttttg

SEQ ID NO: 24030 - DNA, 25 bp, Homo sapiens
ggcaagaagctgcttctgcccacac

SEQ ID NO: 24031 - DNA, 25 bp, Homo sapiens
ggtgccgctctactacatctaggac

SEQ ID NO: 24032 - DNA, 25 bp, Homo sapiens
gtgccgctctactacatctaggacg

SEQ ID NO: 24033 - DNA, 25 bp, Homo sapiens
tcctgccacaacagaataaagcagc

SEQ ID NO: 24034 - DNA, 25 bp, Homo sapiens
tgcagacgggcaagaagctgcttct

SEQ ID NO: 24035 - DNA, 25 bp, Homo sapiens
tgccgctctactacatctaggacgc

SEQ ID NO: 24036 - DNA, 25 bp, Homo sapiens
tgtgtggcgaggtgccgctctacta

SEQ ID NO: 24037 - DNA, 25 bp, Homo sapiens
agatgttacagtcttagggatccgg

SEQ ID NO: 24038 - DNA, 25 bp, Homo sapiens
agcagatgttacagtcttagggatc

SEQ ID NO: 24039 - DNA, 25 bp, Homo sapiens
agcagtgggacgtgtttctgtcata

SEQ ID NO: 24040 - DNA, 25 bp, Homo sapiens
agggtcgtcactcctttaatcctct

SEQ ID NO: 24041 - DNA, 25 bp, Homo sapiens
atgttacagtcttagggatccggga

SEQ ID NO: 24042 - DNA, 25 bp, Homo sapiens
cagtgggacgtgtttctgtcataat

SEQ ID NO: 24043 - DNA, 25 bp, Homo sapiens
ctgtcataatgcaggcatgaagggt

SEQ ID NO: 24044 - DNA, 25 bp, Homo sapiens
cttaggtttggagctctggatgtac

SEQ ID NO: 24045 - DNA, 25 bp, Homo sapiens
cttctacaggcttttgggaagtagg

SEQ ID NO: 24046 - DNA, 25 bp, Homo sapiens
ggccacagcttaggtttggagctct

SEQ ID NO: 24047 - DNA, 25 bp, Homo sapiens
gggtcgtcactcctttaatcctcta

SEQ ID NO: 24048 - DNA, 25 bp, Homo sapiens
tagaaagggtcgtcactcctttaat

SEQ ID NO: 24049 - DNA, 25 bp, Homo sapiens
tctgtcataatgcaggcatgaaggg

SEQ ID NO: 24050 - DNA, 25 bp, Homo sapiens
tggagctctggatgtacatacataa

SEQ ID NO: 24051 - DNA, 25 bp, Homo sapiens
tgggacgtgtttctgtcataatgca

SEQ ID NO: 24052 - DNA, 25 bp, Homo sapiens
tgttacagtcttagggatccgggat

SEQ ID NO: 24053 - DNA, 25 bp, Homo sapiens
accctccaacgaggaagagaatgtg

SEQ ID NO: 24054 - DNA, 25 bp, Homo sapiens
agacagggaggcagcctgtccatct

SEQ ID NO: 24055 - DNA, 25 bp, Homo sapiens
atccactgactgtccaagggccact

SEQ ID NO: 24056 - DNA, 25 bp, Homo sapiens
cgagacagccccttcaggatttcca

SEQ ID NO: 24057 - DNA, 25 bp, Homo sapiens
ctccaacgaggaagagaatgtgaag

SEQ ID NO: 24058 - DNA, 25 bp, Homo sapiens
ctgtccatctgtgcataaggagagg

SEQ ID NO: 24059 - DNA, 25 bp, Homo sapiens
gcagcctgtccatctgtgcataagg

SEQ ID NO: 24060 - DNA, 25 bp, Homo sapiens
gccttgagcatccactgactgtcca

SEQ ID NO: 24061 - DNA, 25 bp, Homo sapiens
ggaccttgcccaaatagcaccttag

SEQ ID NO: 24062 - DNA, 25 bp, Homo sapiens
tgaagctggcccatgtgaagcacaa

SEQ ID NO: 24063 - DNA, 25 bp, Homo sapiens
tgatcggctgccacctggagcagcc

SEQ ID NO: 24064 - DNA, 25 bp, Homo sapiens
tgccctggccttgagcatccactga

SEQ ID NO: 24065 - DNA, 25 bp, Homo sapiens
tggaccttgcccaaatagcacctta

SEQ ID NO: 24066 - DNA, 25 bp, Homo sapiens
tgtgaagcacaaggagcagatctga

SEQ ID NO: 24067 - DNA, 25 bp, Homo sapiens
ttccactggaccttgcccaaatagc

SEQ ID NO: 24068 - DNA, 25 bp, Homo sapiens
ttttcaggggccttcacatggagga

SEQ ID NO: 24069 - DNA, 25 bp, Homo sapiens
aaacctgtgctgttattcaactgac

SEQ ID NO: 24070 - DNA, 25 bp, Homo sapiens
agagtctatttcttgtaaccatttg

SEQ ID NO: 24071 - DNA, 25 bp, Homo sapiens
atttaacctaaagcagagcaagaag

SEQ ID NO: 24072 - DNA, 25 bp, Homo sapiens
caggctgacttggatgtgaactgtc

SEQ ID NO: 24073 - DNA, 25 bp, Homo sapiens
cctcttgtacagagtctatttcttg

SEQ ID NO: 24074 - DNA, 25 bp, Homo sapiens
ctaaacctgtgctgttattcaactg

SEQ ID NO: 24075 - DNA, 25 bp, Homo sapiens
ctgtgatttctaaacctgtgctgtt

SEQ ID NO: 24076 - DNA, 25 bp, Homo sapiens
ctgtgctgttattcaactgactttt

SEQ ID NO: 24077 - DNA, 25 bp, Homo sapiens
cttctgctgctgtgatttctaaacc

SEQ ID NO: 24078 - DNA, 25 bp, Homo sapiens
gtacagagtctatttcttgtaacca

SEQ ID NO: 24079 - DNA, 25 bp, Homo sapiens
tgctgctgtgatttctaaacctgtg

SEQ ID NO: 24080 - DNA, 25 bp, Homo sapiens
tgctgtgatttctaaacctgtgctg

SEQ ID NO: 24081 - DNA, 25 bp, Homo sapiens
tgtacattgcttctgctgctgtgat

SEQ ID NO: 24082 - DNA, 25 bp, Homo sapiens
tgtctgtacattgcttctgctgctg

SEQ ID NO: 24083 - DNA, 25 bp, Homo sapiens
ttaacctaaagcagagcaagaagag

SEQ ID NO: 24084 - DNA, 25 bp, Homo sapiens
ttgcttctgctgctgtgatttctaa

SEQ ID NO: 24085 - DNA, 25 bp, Homo sapiens
aaggcagcctttttctggccttgac

SEQ ID NO: 24086 - DNA, 25 bp, Homo sapiens
acataaaacacacaagcgccccgtg

SEQ ID NO: 24087 - DNA, 25 bp, Homo sapiens
caaggagtacaacctggtctgagcg

SEQ ID NO: 24088 - DNA, 25 bp, Homo sapiens
caccttttgtcaacggcaaaggcag

SEQ ID NO: 24089 - DNA, 25 bp, Homo sapiens
gaacatccgcttcgtgttcgcggcc

SEQ ID NO: 24090 - DNA, 25 bp, Homo sapiens
gcaccttctcaccttttgtcaacgg

SEQ ID NO: 24091 - DNA, 25 bp, Homo sapiens
gcagctcaacctcaaggagtacaac

SEQ ID NO: 24092 - DNA, 25 bp, Homo sapiens
ggccttgacttatggctcgcttttt

SEQ ID NO: 24093 - DNA, 25 bp, Homo sapiens
tacaacctggtctgagcgcccaggc

SEQ ID NO: 24094 - DNA, 25 bp, Homo sapiens
tcaaggagtacaacctggtctgagc

SEQ ID NO: 24095 - DNA, 25 bp, Homo sapiens
tcacaaaaggcgtggagactcggag

SEQ ID NO: 24096 - DNA, 25 bp, Homo sapiens
tcgcggccgtgaaggacaccatcct

SEQ ID NO: 24097 - DNA, 25 bp, Homo sapiens
tggagactcggagacggacgttttt

SEQ ID NO: 24098 - DNA, 25 bp, Homo sapiens
tgttcgcggccgtgaaggacaccat

SEQ ID NO: 24099 - DNA, 25 bp, Homo sapiens
ttctggccttgacttatggctcgct

SEQ ID NO: 24100 - DNA, 25 bp, Homo sapiens
ttgtcaacggcaaaggcagcctttt

SEQ ID NO: 24101 - DNA, 25 bp, Homo sapiens
agtccctaccagtttaggctggtgg

SEQ ID NO: 24102 - DNA, 25 bp, Homo sapiens
attcagcatcttttgcagtactctg

SEQ ID NO: 24103 - DNA, 25 bp, Homo sapiens
cagcatcttttgcagtactctgtag

SEQ ID NO: 24104 - DNA, 25 bp, Homo sapiens
catcttttgcagtactctgtagaca

SEQ ID NO: 24105 - DNA, 25 bp, Homo sapiens
ctctaggatttctgaaagttactga

SEQ ID NO: 24106 - DNA, 25 bp, Homo sapiens
gcaattcctattctgttaatcgctg

SEQ ID NO: 24107 - DNA, 25 bp, Homo sapiens
tactctgtagacattagtcagtaat

SEQ ID NO: 24108 - DNA, 25 bp, Homo sapiens
tatttctaggctctgaaatagccac

SEQ ID NO: 24109 - DNA, 25 bp, Homo sapiens
tctgtagacattagtcagtaataca

SEQ ID NO: 24110 - DNA, 25 bp, Homo sapiens
tcttttgcagtactctgtagacatt

SEQ ID NO: 24111 - DNA, 25 bp, Homo sapiens
tgcagtactctgtagacattagtca

SEQ ID NO: 24112 - DNA, 25 bp, Homo sapiens
ttcagcatcttttgcagtactctgt

SEQ ID NO: 24113 - DNA, 25 bp, Homo sapiens
ttccattggctgaagctctttgcaa

SEQ ID NO: 24114 - DNA, 25 bp, Homo sapiens
tttgcagtactctgtagacattagt

SEQ ID NO: 24115 - DNA, 25 bp, Homo sapiens
ttttccattggctgaagctctttgc

SEQ ID NO: 24116 - DNA, 25 bp, Homo sapiens
attggtatggccttagctcttagcc

SEQ ID NO: 24117 - DNA, 25 bp, Homo sapiens
caagagccagtcaaaggtccagtct

SEQ ID NO: 24118 - DNA, 25 bp, Homo sapiens
caagctggactgcataaagattggt

SEQ ID NO: 24119 - DNA, 25 bp, Homo sapiens
ctaaccgctgcttgaaagatactga

SEQ ID NO: 24120 - DNA, 25 bp, Homo sapiens
ctgccccattatcttgatccggtgc

SEQ ID NO: 24121 - DNA, 25 bp, Homo sapiens
gatcccgttaaaggacaagtttcag

SEQ ID NO: 24122 - DNA, 25 bp, Homo sapiens
gccgtgttccattcaatggacaaga

SEQ ID NO: 24123 - DNA, 25 bp, Homo sapiens
gctcttgcgggatggcctgtttcgt

SEQ ID NO: 24124 - DNA, 25 bp, Homo sapiens
ggagttcctgttaaaggtcaagaca

SEQ ID NO: 24125 - DNA, 25 bp, Homo sapiens
ggccttagctcttagccaaacacct

SEQ ID NO: 24126 - DNA, 25 bp, Homo sapiens
gggatggcctgtttcgttccccagt

SEQ ID NO: 24127 - DNA, 25 bp, Homo sapiens
ggtccagtctccactaagcctggct

SEQ ID NO: 24128 - DNA, 25 bp, Homo sapiens
gtcaagacactgtcaaaggccgtgt

SEQ ID NO: 24129 - DNA, 25 bp, Homo sapiens
tcaaaggtccagtctccactaagcc

SEQ ID NO: 24130 - DNA, 25 bp, Homo sapiens
tcccattcaggatgcccacggctgg

SEQ ID NO: 24131 - DNA, 25 bp, Homo sapiens
tggtatggccttagctcttagccaa

SEQ ID NO: 24132 - DNA, 25 bp, Homo sapiens
acggcaaaggcagcctttttctggc

SEQ ID NO: 24133 - DNA, 25 bp, Homo sapiens
caagatcctgtactcgcacctggtg

SEQ ID NO: 24134 - DNA, 25 bp, Homo sapiens
cctgtactcgcacctggtggactac

SEQ ID NO: 24135 - DNA, 25 bp, Homo sapiens
ccttctcaccttttgtcaacggcaa

SEQ ID NO: 24136 - DNA, 25 bp, Homo sapiens
cgagttcgatggtccccagcgggag

SEQ ID NO: 24137 - DNA, 25 bp, Homo sapiens
cgtgttcgcggccgtgaaggacacc

SEQ ID NO: 24138 - DNA, 25 bp, Homo sapiens
cttccccgagttcgatggtccccag

SEQ ID NO: 24139 - DNA, 25 bp, Homo sapiens
gtacaacctggtctgagcgccccag

SEQ ID NO: 24140 - DNA, 25 bp, Homo sapiens
ttatcaggggatgtacatctctccc

SEQ ID NO: 24141 - DNA, 25 bp, Homo sapiens
tttatttcacagttatcaggggatg

SEQ ID NO: 24142 - DNA, 25 bp, Homo sapiens
acagacttggcaagggaccccctgg

SEQ ID NO: 24143 - DNA, 25 bp, Homo sapiens
acccgctgaatttctgaggccttgc

SEQ ID NO: 24144 - DNA, 25 bp, Homo sapiens
accgtattatacttgatgttggtca

SEQ ID NO: 24145 - DNA, 25 bp, Homo sapiens
agattttacctgtttgctgctgaga

SEQ ID NO: 24146 - DNA, 25 bp, Homo sapiens
atagttgtctgacatttccatgaaa

SEQ ID NO: 24147 - DNA, 25 bp, Homo sapiens
atgcttccttagcttttcatagttg

SEQ ID NO: 24148 - DNA, 25 bp, Homo sapiens
ccttagcttttcatagttgtctgac

SEQ ID NO: 24149 - DNA, 25 bp, Homo sapiens
cttaaagctcagaagtggtttaggc

SEQ ID NO: 24150 - DNA, 25 bp, Homo sapiens
gaacctagtcagttctttaagatta

SEQ ID NO: 24151 - DNA, 25 bp, Homo sapiens
gctgccatctggaaattcctctttt

SEQ ID NO: 24152 - DNA, 25 bp, Homo sapiens
ggaaaatctggttcacatcataaag

SEQ ID NO: 24153 - DNA, 25 bp, Homo sapiens
ggttcacatcataaagaacttgatt

SEQ ID NO: 24154 - DNA, 25 bp, Homo sapiens
gttggtcatttctcagtcctatttc

SEQ ID NO: 24155 - DNA, 25 bp, Homo sapiens
tgctgctgagaacatctctgcctaa

SEQ ID NO: 24156 - DNA, 25 bp, Homo sapiens
tttagaacctagtcagttctttaag

SEQ ID NO: 24157 - DNA, 25 bp, Homo sapiens
caccttctacaatgagctgcgtgtg

SEQ ID NO: 24158 - DNA, 25 bp, Homo sapiens
ccacactgtgcccatctacgagggg

SEQ ID NO: 24159 - DNA, 25 bp, Homo sapiens
ccagatcatgtttgagaccttcaac

SEQ ID NO: 24160 - DNA, 25 bp, Homo sapiens
cccagccatgtacgttgctatccag

SEQ ID NO: 24161 - DNA, 25 bp, Homo sapiens
ccccatcgagcacggcatcgtcacc

SEQ ID NO: 24162 - DNA, 25 bp, Homo sapiens
cgcctctggccgtaccactggcatc

SEQ ID NO: 24163 - DNA, 25 bp, Homo sapiens
cggctccggcatgtgcaaggccggc

SEQ ID NO: 24164 - DNA, 25 bp, Homo sapiens
cggtgacggggtcacccacactgtg

SEQ ID NO: 24165 - DNA, 25 bp, Homo sapiens
cgtcaccaactgggacgacatggag

SEQ ID NO: 24166 - DNA, 25 bp, Homo sapiens
cgtcgtcgacaacggctccggcatg

SEQ ID NO: 24167 - DNA, 25 bp, Homo sapiens
cgttgctatccaggctgtgctatcc

SEQ ID NO: 24168 - DNA, 25 bp, Homo sapiens
gaaggattcctatgtgggcgacgag

SEQ ID NO: 24169 - DNA, 25 bp, Homo sapiens
gcccatctacgaggggtatgccctc

SEQ ID NO: 24170 - DNA, 25 bp, Homo sapiens
ggccaaccgcgagaagatgacccag

SEQ ID NO: 24171 - DNA, 25 bp, Homo sapiens
ggctgtgctatccctgtacgcctct

SEQ ID NO: 24172 - DNA, 25 bp, Homo sapiens
gggtcagaaggattcctatgtgggc

SEQ ID NO: 24173 - DNA, 25 bp, Homo sapiens
taccactggcatcgtgatggactcc

SEQ ID NO: 24174 - DNA, 25 bp, Homo sapiens
tcccgaggagcaccccgtgctgctg

SEQ ID NO: 24175 - DNA, 25 bp, Homo sapiens
tgatatcgccgcgctcgtcgtcgac

SEQ ID NO: 24176 - DNA, 25 bp, Homo sapiens
tgccatcctgcgtctggacctggct

SEQ ID NO: 24177 - DNA, 25 bp, Homo sapiens
aagcaagcgtaatcttcaggataat

SEQ ID NO: 24178 - DNA, 25 bp, Homo sapiens
caaatgcaaaaccttgcagaacaga

SEQ ID NO: 24179 - DNA, 25 bp, Homo sapiens
caccatccgttttcatgacctcctg

SEQ ID NO: 24180 - DNA, 25 bp, Homo sapiens
cagagaacacgagaccaatggtgtg

SEQ ID NO: 24181 - DNA, 25 bp, Homo sapiens
cagttttcccatggaaatcagacag

SEQ ID NO: 24182 - DNA, 25 bp, Homo sapiens
catttacagctgtctgaaggaagaa

SEQ ID NO: 24183 - DNA, 25 bp, Homo sapiens
cccaatccagatgtctatgatcatt

SEQ ID NO: 24184 - DNA, 25 bp, Homo sapiens
cctcctgtcacagctggatgatcaa

SEQ ID NO: 24185 - DNA, 25 bp, Homo sapiens
cgctgccaatgatgtttcatttgcc

SEQ ID NO: 24186 - DNA, 25 bp, Homo sapiens
gaaacaagaacagctgttactcaag

SEQ ID NO: 24187 - DNA, 25 bp, Homo sapiens
gagatttaatcaggctcagtcgggg

SEQ ID NO: 24188 - DNA, 25 bp, Homo sapiens
ggaaatcagacagtacctggcacag

SEQ ID NO: 24189 - DNA, 25 bp, Homo sapiens
ggagaataacttcttgctacagcat

SEQ ID NO: 24190 - DNA, 25 bp, Homo sapiens
ggagcacgctgccaatgatgtttca

SEQ ID NO: 24191 - DNA, 25 bp, Homo sapiens
ggagcaggttcaccagctttatgat

SEQ ID NO: 24192 - DNA, 25 bp, Homo sapiens
gtacctggcacagtggttagaaaag

SEQ ID NO: 24193 - DNA, 25 bp, Homo sapiens
taattttcaggaagacccaatccag

SEQ ID NO: 24194 - DNA, 25 bp, Homo sapiens
tattcagagcacagtgatgttagac

SEQ ID NO: 24195 - DNA, 25 bp, Homo sapiens
tctggaaaacgcccagagatttaat

SEQ ID NO: 24196 - DNA, 25 bp, Homo sapiens
tgtttcatttgccaccatccgtttt

SEQ ID NO: 24197 - DNA, 25 bp, Homo sapiens
aaaggcgtctgacagtcctgagaat

SEQ ID NO: 24198 - DNA, 25 bp, Homo sapiens
aagtatcccaaatcggtgtaccttg

SEQ ID NO: 24199 - DNA, 25 bp, Homo sapiens
agcatctgccgtgtagaaacgttat

SEQ ID NO: 24200 - DNA, 25 bp, Homo sapiens
attacttcattgttcagtggccggc

SEQ ID NO: 24201 - DNA, 25 bp, Homo sapiens
attgtctacgttgaaagcatctgcc

SEQ ID NO: 24202 - DNA, 25 bp, Homo sapiens
gaaacgttatccatgtccggaaaga

SEQ ID NO: 24203 - DNA, 25 bp, Homo sapiens
gaaactgaggcttctcttatgaaac

SEQ ID NO: 24204 - DNA, 25 bp, Homo sapiens
gacaaatggcaactgacttctttag

SEQ ID NO: 24205 - DNA, 25 bp, Homo sapiens
tatgcctctgtaaaccaaatttctt

SEQ ID NO: 24206 - DNA, 25 bp, Homo sapiens
tcctttcccctaattcacagggtga

SEQ ID NO: 24207 - DNA, 25 bp, Homo sapiens
ttcctatctgtgtatctgcccttct

SEQ ID NO: 24208 - DNA, 25 bp, Homo sapiens
aaggttccccaccattcagtgagag

SEQ ID NO: 24209 - DNA, 25 bp, Homo sapiens
agccctgccactgttgctagtcagg

SEQ ID NO: 24210 - DNA, 25 bp, Homo sapiens
agcctctgctggtagcatgtcgcag

SEQ ID NO: 24211 - DNA, 25 bp, Homo sapiens
aggctaagcagttgaaggttcccca

SEQ ID NO: 24212 - DNA, 25 bp, Homo sapiens
atgtcgcagtttccatgtgtttcag

SEQ ID NO: 24213 - DNA, 25 bp, Homo sapiens
cactgttgacatctattttctgaag

SEQ ID NO: 24214 - DNA, 25 bp, Homo sapiens
ccatgtgtttcaggatcttcgggct

SEQ ID NO: 24215 - DNA, 25 bp, Homo sapiens
ggatcttcgggctgtcgttagacag

SEQ ID NO: 24216 - DNA, 25 bp, Homo sapiens
gttctcccacttacactgttgacat

SEQ ID NO: 24217 - DNA, 25 bp, Homo sapiens
tattgagtcctgttgttgtaagcca

SEQ ID NO: 24218 - DNA, 25 bp, Homo sapiens
tgtcaggatgtacagtccttgctcc

SEQ ID NO: 24219 - DNA, 25 bp, Homo sapiens
aaaacttgcactggcttgtctcact

SEQ ID NO: 24220 - DNA, 25 bp, Homo sapiens
acatgtcggagctgtttgcctgggt

SEQ ID NO: 24221 - DNA, 25 bp, Homo sapiens
atgtgcttagccataacaattccat

SEQ ID NO: 24222 - DNA, 25 bp, Homo sapiens
ctgggtaccgtacctgtcaatgcct

SEQ ID NO: 24223 - DNA, 25 bp, Homo sapiens
gagcctcaatcaagcagaaactttt

SEQ ID NO: 24224 - DNA, 25 bp, Homo sapiens
gattttcataattagcacgtacata

SEQ ID NO: 24225 - DNA, 25 bp, Homo sapiens
ggaagcaccctgttatctaaagaat

SEQ ID NO: 24226 - DNA, 25 bp, Homo sapiens
ggcttgtctcacttacgaaacatgt

SEQ ID NO: 24227 - DNA, 25 bp, Homo sapiens
tcaggtgataactgagcctcaatca

SEQ ID NO: 24228 - DNA, 25 bp, Homo sapiens
tctgggctgatgaatacatttacct

SEQ ID NO: 24229 - DNA, 25 bp, Homo sapiens
ttttttggccttctatgtgcttagc

SEQ ID NO: 24230 - DNA, 25 bp, Homo sapiens
aacacggagtacacctgtttccagg

SEQ ID NO: 24231 - DNA, 25 bp, Homo sapiens
acctgtttccaggacaaccaagcat

SEQ ID NO: 24232 - DNA, 25 bp, Homo sapiens
acttcaggtactacccgtcttctat

SEQ ID NO: 24233 - DNA, 25 bp, Homo sapiens
agcattttcatgaaacaaccccaaa

SEQ ID NO: 24234 - DNA, 25 bp, Homo sapiens
caaggtcccaccaacagttcagaaa

SEQ ID NO: 24235 - DNA, 25 bp, Homo sapiens
caccaacagttcagaaacctaccac

SEQ ID NO: 24236 - DNA, 25 bp, Homo sapiens
caggtactacccgtcttctatctgg

SEQ ID NO: 24237 - DNA, 25 bp, Homo sapiens
gcaacacggagtacacctgtttcca

SEQ ID NO: 24238 - DNA, 25 bp, Homo sapiens
gtggaaccacttcaggtactacccg

SEQ ID NO: 24239 - DNA, 25 bp, Homo sapiens
taacttccaaggtcccaccaacagt

SEQ ID NO: 24240 - DNA, 25 bp, Homo sapiens
tggaaccacttcaggtactacccgt

SEQ ID NO: 24241 - DNA, 25 bp, Homo sapiens
aggctggccttacctggtatggttt

SEQ ID NO: 24242 - DNA, 25 bp, Homo sapiens
caacacatgcaggcagctatttggg

SEQ ID NO: 24243 - DNA, 25 bp, Homo sapiens
cctgttgatgggtgtctggactgtt

SEQ ID NO: 24244 - DNA, 25 bp, Homo sapiens
gctgagtagcactgcaacacatgca

SEQ ID NO: 24245 - DNA, 25 bp, Homo sapiens
ggattgcaggctggccttacctggt

SEQ ID NO: 24246 - DNA, 25 bp, Homo sapiens
gggatcttttcacctgttgatgggt

SEQ ID NO: 24247 - DNA, 25 bp, Homo sapiens
gttcatgttgatgcctggagtttca

SEQ ID NO: 24248 - DNA, 25 bp, Homo sapiens
taattccctcccattcgttgctgag

SEQ ID NO: 24249 - DNA, 25 bp, Homo sapiens
tcccattcgttgctgagtagcactg

SEQ ID NO: 24250 - DNA, 25 bp, Homo sapiens
ttgatgggtgtctggactgtttcca

SEQ ID NO: 24251 - DNA, 25 bp, Homo sapiens
tttttggctgttacaaatgaagcct

SEQ ID NO: 24252 - DNA, 25 bp, Homo sapiens
aatgatgcctttgtgactggcgagt

SEQ ID NO: 24253 - DNA, 25 bp, Homo sapiens
agtgttaatgatgcctttgtgactg

SEQ ID NO: 24254 - DNA, 25 bp, Homo sapiens
atgatgcctttgtgactggcgagtg

SEQ ID NO: 24255 - DNA, 25 bp, Homo sapiens
ctgtctgagtgttaatgatgccttt

SEQ ID NO: 24256 - DNA, 25 bp, Homo sapiens
gcctgtctgagtgttaatgatgcct

SEQ ID NO: 24257 - DNA, 25 bp, Homo sapiens
gtctgagtgttaatgatgcctttgt

SEQ ID NO: 24258 - DNA, 25 bp, Homo sapiens
gtggcctgtctgagtgttaatgatg

SEQ ID NO: 24259 - DNA, 25 bp, Homo sapiens
tgaaggccaagggagtccaggtggt

SEQ ID NO: 24260 - DNA, 25 bp, Homo sapiens
tgagtgttaatgatgcctttgtgac

SEQ ID NO: 24261 - DNA, 25 bp, Homo sapiens
tggtggcctgtctgagtgttaatga

SEQ ID NO: 24262 - DNA, 25 bp, Homo sapiens
ttaatgatgcctttgtgactggcga

SEQ ID NO: 24263 - DNA, 25 bp, Homo sapiens
aagttaatcacctctttaaatgctc

SEQ ID NO: 24264 - DNA, 25 bp, Homo sapiens
aggcctgacttgtgtaaccactaca

SEQ ID NO: 24265 - DNA, 25 bp, Homo sapiens
agggtacatgaacccctaccaggct

SEQ ID NO: 24266 - DNA, 25 bp, Homo sapiens
atgagagtttgacttctgagggtaa

SEQ ID NO: 24267 - DNA, 25 bp, Homo sapiens
atggtggcagggtacatgaacccct

SEQ ID NO: 24268 - DNA, 25 bp, Homo sapiens
cacctctttaaatgctcaatctcca

SEQ ID NO: 24269 - DNA, 25 bp, Homo sapiens
cattgaataggcctgacttgtgtaa

SEQ ID NO: 24270 - DNA, 25 bp, Homo sapiens
ccttcttctattcacacccttgtgt

SEQ ID NO: 24271 - DNA, 25 bp, Homo sapiens
ggattttaactttaaccagcctcat

SEQ ID NO: 24272 - DNA, 25 bp, Homo sapiens
gtaaccactacactattgaagaaat

SEQ ID NO: 24273 - DNA, 25 bp, Homo sapiens
taactttaaccagcctcatttaagt

SEQ ID NO: 24274 - DNA, 25 bp, Homo sapiens
atgtgttcagaagtcgctgtcctta

SEQ ID NO: 24275 - DNA, 25 bp, Homo sapiens
cagcttcgagtttgcgcttgcaatt

SEQ ID NO: 24276 - DNA, 25 bp, Homo sapiens
gaaggctccacttgttcttaaagac

SEQ ID NO: 24277 - DNA, 25 bp, Homo sapiens
gatttctcagcctacaaattgtgtc

SEQ ID NO: 24278 - DNA, 25 bp, Homo sapiens
gcagcgaactgcgacgatcacttag

SEQ ID NO: 24279 - DNA, 25 bp, Homo sapiens
ggcctgattcttacaagccgggggc

SEQ ID NO: 24280 - DNA, 25 bp, Homo sapiens
ggtcattacacctactctgagaatc

SEQ ID NO: 24281 - DNA, 25 bp, Homo sapiens
gtaaagttacaacacaccctcttgc

SEQ ID NO: 24282 - DNA, 25 bp, Homo sapiens
gtggcggctcaagtgaaggctccac

SEQ ID NO: 24283 - DNA, 25 bp, Homo sapiens
taggaatccattctcactgtgttcg

SEQ ID NO: 24284 - DNA, 25 bp, Homo sapiens
tgtgtctatacatttctaagccttg

SEQ ID NO: 24285 - DNA, 25 bp, Homo sapiens
agaggcaatgactcgttacctgccg

SEQ ID NO: 24286 - DNA, 25 bp, Homo sapiens
attgtgcacaagtctttccagagga

SEQ ID NO: 24287 - DNA, 25 bp, Homo sapiens
cctaacctttcgccgaatggggcag

SEQ ID NO: 24288 - DNA, 25 bp, Homo sapiens
gagaggctgagtacggatgggaaac

SEQ ID NO: 24289 - DNA, 25 bp, Homo sapiens
gaggaagtagtccagccttccaggt

SEQ ID NO: 24290 - DNA, 25 bp, Homo sapiens
gccactgggacccgaggatttctgg

SEQ ID NO: 24291 - DNA, 25 bp, Homo sapiens
gctcaccgtggattttctcatagga

SEQ ID NO: 24292 - DNA, 25 bp, Homo sapiens
ggccttccctggccttgagtagaaa

SEQ ID NO: 24293 - DNA, 25 bp, Homo sapiens
ggtcacgttcttggatcctcagaac

SEQ ID NO: 24294 - DNA, 25 bp, Homo sapiens
gtcggggatcggggcaagagaggct

SEQ ID NO: 24295 - DNA, 25 bp, Homo sapiens
tgggaactcacgtggggagcggtgg

SEQ ID NO: 24296 - DNA, 25 bp, Homo sapiens
aatgggatggtcggatctcacaggc

SEQ ID NO: 24297 - DNA, 25 bp, Homo sapiens
agccaggaaggccaaaatcaagagt

SEQ ID NO: 24298 - DNA, 25 bp, Homo sapiens
cggactgtcagttctctgggaagtg

SEQ ID NO: 24299 - DNA, 25 bp, Homo sapiens
ctagggactgccaggctgtttcagc

SEQ ID NO: 24300 - DNA, 25 bp, Homo sapiens
gatgattgtcataaggtttttagca

SEQ ID NO: 24301 - DNA, 25 bp, Homo sapiens
gctgcttcttattaatcatacaaac

SEQ ID NO: 24302 - DNA, 25 bp, Homo sapiens
ggtcggatctcacaggctgagaact

SEQ ID NO: 24303 - DNA, 25 bp, Homo sapiens
gttggttcaaacttttgggagcacg

SEQ ID NO: 24304 - DNA, 25 bp, Homo sapiens
tcatacaaactctcaccatgatgtg

SEQ ID NO: 24305 - DNA, 25 bp, Homo sapiens
tgtcttttggagaaccagggctctt

SEQ ID NO: 24306 - DNA, 25 bp, Homo sapiens
ttgggagcacggactgtcagttctc

SEQ ID NO: 24307 - DNA, 25 bp, Homo sapiens
aacacacctttatggctggggctct

SEQ ID NO: 24308 - DNA, 25 bp, Homo sapiens
agacaccattcacttttactgcttt

SEQ ID NO: 24309 - DNA, 25 bp, Homo sapiens
atcttctacttgcctgtggggaggg

SEQ ID NO: 24310 - DNA, 25 bp, Homo sapiens
cttgagcagaacaggggcttcccca

SEQ ID NO: 24311 - DNA, 25 bp, Homo sapiens
gattcaaagagattcctgcaggcca

SEQ ID NO: 24312 - DNA, 25 bp, Homo sapiens
gcaggccagaggccggaacacacct

SEQ ID NO: 24313 - DNA, 25 bp, Homo sapiens
gccactccagagaacctcttgggag

SEQ ID NO: 24314 - DNA, 25 bp, Homo sapiens
ggtaaagacacctggatcagactcc

SEQ ID NO: 24315 - DNA, 25 bp, Homo sapiens
tactgctttgtagtgactcgtgctc

SEQ ID NO: 24316 - DNA, 25 bp, Homo sapiens
tcatgagagcaaaccgtagtcccct

SEQ ID NO: 24317 - DNA, 25 bp, Homo sapiens
tcccaggcacaggtgttgcaccagg

SEQ ID NO: 24318 - DNA, 25 bp, Homo sapiens
aggatgaaagttcccccatcagttc

SEQ ID NO: 24319 - DNA, 25 bp, Homo sapiens
atccatccatctccagggagcaaga

SEQ ID NO: 24320 - DNA, 25 bp, Homo sapiens
caagcaagtagctttccacatttgt

SEQ ID NO: 24321 - DNA, 25 bp, Homo sapiens
cccagtacctccaagcaagtagctt

SEQ ID NO: 24322 - DNA, 25 bp, Homo sapiens
gaaagcggagttcctaacaggatga

SEQ ID NO: 24323 - DNA, 25 bp, Homo sapiens
gacgcaggatggaaagcggagttcc

SEQ ID NO: 24324 - DNA, 25 bp, Homo sapiens
gggagcaagacagagacgcaggatg

SEQ ID NO: 24325 - DNA, 25 bp, Homo sapiens
gtacctccaagcaagtagctttcca

SEQ ID NO: 24326 - DNA, 25 bp, Homo sapiens
tagactagtgccgtgggagtacctg

SEQ ID NO: 24327 - DNA, 25 bp, Homo sapiens
tccacatttgtcacagaaatcagag

SEQ ID NO: 24328 - DNA, 25 bp, Homo sapiens
tccccctgtagactagtgccgtggg

SEQ ID NO: 24329 - DNA, 25 bp, Homo sapiens
aatgacgcggctcaaaaggaaacca

SEQ ID NO: 24330 - DNA, 25 bp, Homo sapiens
agccctttggagaacgccagtctcc

SEQ ID NO: 24331 - DNA, 25 bp, Homo sapiens
cacaacctctctgatcttgtgctca

SEQ ID NO: 24332 - DNA, 25 bp, Homo sapiens
cactgatctctactaccacaaggaa

SEQ ID NO: 24333 - DNA, 25 bp, Homo sapiens
cagattgcctcctaatgacgcggct

SEQ ID NO: 24334 - DNA, 25 bp, Homo sapiens
ccccctgcatctatcgagtttgcaa

SEQ ID NO: 24335 - DNA, 25 bp, Homo sapiens
cttgtgctcagcatgattctttaat

SEQ ID NO: 24336 - DNA, 25 bp, Homo sapiens
gggtgagccagtggaacagcgggag

SEQ ID NO: 24337 - DNA, 25 bp, Homo sapiens
taggagaaaccagcttttactgttt

SEQ ID NO: 24338 - DNA, 25 bp, Homo sapiens
tggtgttgggagccctttggagaac

SEQ ID NO: 24339 - DNA, 25 bp, Homo sapiens
tttttcgtgcactctgctaatcatg

SEQ ID NO: 24340 - DNA, 25 bp, Homo sapiens
aaaacagttcttctgctggtgactc

SEQ ID NO: 24341 - DNA, 25 bp, Homo sapiens
agcctgcagtgctacaactgtccta

SEQ ID NO: 24342 - DNA, 25 bp, Homo sapiens
aggagttgagacctacttcacagta

SEQ ID NO: 24343 - DNA, 25 bp, Homo sapiens
caatttcaacgacgtcacaacccgc

SEQ ID NO: 24344 - DNA, 25 bp, Homo sapiens
ccttcatccctaagtcaacaccagg

SEQ ID NO: 24345 - DNA, 25 bp, Homo sapiens
gagctaacgtactactgctgcaaga

SEQ ID NO: 24346 - DNA, 25 bp, Homo sapiens
gatgcgtgtctcattaccaaagctg

SEQ ID NO: 24347 - DNA, 25 bp, Homo sapiens
gtcttctgccattcaggtcatagcc

SEQ ID NO: 24348 - DNA, 25 bp, Homo sapiens
tccaaggagggtctgtcctgttcgg

SEQ ID NO: 24349 - DNA, 25 bp, Homo sapiens
tccatttctggcagcagcctggagc

SEQ ID NO: 24350 - DNA, 25 bp, Homo sapiens
ttctcttgctgccacattctaaagg

SEQ ID NO: 24351 - DNA, 25 bp, Homo sapiens
aaaccagctttctttgcagagaagc

SEQ ID NO: 24352 - DNA, 25 bp, Homo sapiens
agaaatgcctcacagctatcgtgaa

SEQ ID NO: 24353 - DNA, 25 bp, Homo sapiens
agaagatgtatggtatctccctttg

SEQ ID NO: 24354 - DNA, 25 bp, Homo sapiens
cctttgccaagccatcctggatgaa

SEQ ID NO: 24355 - DNA, 25 bp, Homo sapiens
gaaactaaacattcccttgatggtc

SEQ ID NO: 24356 - DNA, 25 bp, Homo sapiens
gatggtctcaagctatgatcagaag

SEQ ID NO: 24357 - DNA, 25 bp, Homo sapiens
gcagagaagcttcatcaagccatga

SEQ ID NO: 24358 - DNA, 25 bp, Homo sapiens
gcgccacaagcaaaccagctttctt

SEQ ID NO: 24359 - DNA, 25 bp, Homo sapiens
gctatcgtgaagtgcgccacaagca

SEQ ID NO: 24360 - DNA, 25 bp, Homo sapiens
ggtgttggaactcgccataaggcat

SEQ ID NO: 24361 - DNA, 25 bp, Homo sapiens
tatggtttcccgttctgaaattgac

SEQ ID NO: 24362 - DNA, 25 bp, Homo sapiens
aagccaatgtagtccagtttctaag

SEQ ID NO: 24363 - DNA, 25 bp, Homo sapiens
agaggcgggatactttcagctttcc

SEQ ID NO: 24364 - DNA, 25 bp, Homo sapiens
agatgaggtccctggtttttcatgg

SEQ ID NO: 24365 - DNA, 25 bp, Homo sapiens
aggatttcacctctgtttgtaacta

SEQ ID NO: 24366 - DNA, 25 bp, Homo sapiens
caggcccaagcctgtggtatgatgt

SEQ ID NO: 24367 - DNA, 25 bp, Homo sapiens
gatgtgcacacttgctagactcaga

SEQ ID NO: 24368 - DNA, 25 bp, Homo sapiens
gttccaagctaactgaatcccactt

SEQ ID NO: 24369 - DNA, 25 bp, Homo sapiens
tacacactcatgaactcctgatgga

SEQ ID NO: 24370 - DNA, 25 bp, Homo sapiens
tgaatcccacttcaatacacactca

SEQ ID NO: 24371 - DNA, 25 bp, Homo sapiens
tgacaacctactttgcttggctgag

SEQ ID NO: 24372 - DNA, 25 bp, Homo sapiens
tgtatagtcgctgcacatatttgaa

SEQ ID NO: 24373 - DNA, 25 bp, Homo sapiens
ctccttttaaccaagcttagcttct

SEQ ID NO: 24374 - DNA, 25 bp, Homo sapiens
gatcctttctgtaggctaattcctc

SEQ ID NO: 24375 - DNA, 25 bp, Homo sapiens
gcactatgcctgattgctgatcgtg

SEQ ID NO: 24376 - DNA, 25 bp, Homo sapiens
gctaaaaaggattccgtctccttca

SEQ ID NO: 24377 - DNA, 25 bp, Homo sapiens
ggcatatggagtgtccttattgcta

SEQ ID NO: 24378 - DNA, 25 bp, Homo sapiens
ggtattaagtcgttgcctttatttg

SEQ ID NO: 24379 - DNA, 25 bp, Homo sapiens
gtgtttatattttggagccttcctg

SEQ ID NO: 24380 - DNA, 25 bp, Homo sapiens
taattcctcttgcccaacggcatat

SEQ ID NO: 24381 - DNA, 25 bp, Homo sapiens
ttagcttctcaaaggcctaaccaag

SEQ ID NO: 24382 - DNA, 25 bp, Homo sapiens
ttcaattccatcctaaaactccttt

SEQ ID NO: 24383 - DNA, 25 bp, Homo sapiens
ttggtccagagtacttgttttcccg

SEQ ID NO: 24384 - DNA, 25 bp, Homo sapiens
atagaagaagccccacgggagccag

SEQ ID NO: 24385 - DNA, 25 bp, Homo sapiens
ctcaaagactctcccgtggatgacg

SEQ ID NO: 24386 - DNA, 25 bp, Homo sapiens
gatgggactggtcgtgtttgtgctt

SEQ ID NO: 24387 - DNA, 25 bp, Homo sapiens
ggacactcaagacttttgactgcca

SEQ ID NO: 24388 - DNA, 25 bp, Homo sapiens
ggactctgggctgctggaataggac

SEQ ID NO: 24389 - DNA, 25 bp, Homo sapiens
tatgcagtgtgctttttcttgccag

SEQ ID NO: 24390 - DNA, 25 bp, Homo sapiens
tcaaacggccgaagttgcctctttt

SEQ ID NO: 24391 - DNA, 25 bp, Homo sapiens
tgggccattcttgcttagacagtca

SEQ ID NO: 24392 - DNA, 25 bp, Homo sapiens
tgtctcctcctttaactgagtcatc

SEQ ID NO: 24393 - DNA, 25 bp, Homo sapiens
tgtgcttttctccaagtcagcaccc

SEQ ID NO: 24394 - DNA, 25 bp, Homo sapiens
ttcagtggagactccctggccaaca

SEQ ID NO: 24395 - DNA, 25 bp, Homo sapiens
acctgtactgtcccggaggaggttg

SEQ ID NO: 24396 - DNA, 25 bp, Homo sapiens
cacaaaaccccagggacagcggtct

SEQ ID NO: 24397 - DNA, 25 bp, Homo sapiens
cagcgcaaggaggggctgcttctga

SEQ ID NO: 24398 - DNA, 25 bp, Homo sapiens
ctgtcccggaggaggttgggaggtg

SEQ ID NO: 24399 - DNA, 25 bp, Homo sapiens
cttctggtccagcgcaaggaggggc

SEQ ID NO: 24400 - DNA, 25 bp, Homo sapiens
gctgtctttccattaaagaaacacc

SEQ ID NO: 24401 - DNA, 25 bp, Homo sapiens
ggtccagcgcaaggaggggctgctt

SEQ ID NO: 24402 - DNA, 25 bp, Homo sapiens
tcggtggctgtctttccattaaaga

SEQ ID NO: 24403 - DNA, 25 bp, Homo sapiens
tctctctttctgtgtgtgtgtgtgt

SEQ ID NO: 24404 - DNA, 25 bp, Homo sapiens
ttatccttctggtccagcgcaagga

SEQ ID NO: 24405 - DNA, 25 bp, Homo sapiens
ttgggaggtggaggcccagcatccc

SEQ ID NO: 24406 - DNA, 25 bp, Homo sapiens
aaatgggagggcattccatcccttc

SEQ ID NO: 24407 - DNA, 25 bp, Homo sapiens
cctgaagggggacactccatgagtg

SEQ ID NO: 24408 - DNA, 25 bp, Homo sapiens
cttcattttggagcttgtggagttg

SEQ ID NO: 24409 - DNA, 25 bp, Homo sapiens
gcatattttctctaggcttttttcc

SEQ ID NO: 24410 - DNA, 25 bp, Homo sapiens
gcattccatcccttcctgaaggggg

SEQ ID NO: 24411 - DNA, 25 bp, Homo sapiens
gccacgattggagaatactttgctt

SEQ ID NO: 24412 - DNA, 25 bp, Homo sapiens
gcttttattcgtcctttgacaaaag

SEQ ID NO: 24413 - DNA, 25 bp, Homo sapiens
ggagcacatgttactgcttcatttt

SEQ ID NO: 24414 - DNA, 25 bp, Homo sapiens
ggcagctatctgcactctaaactgc

SEQ ID NO: 24415 - DNA, 25 bp, Homo sapiens
gtggagttgatgactttctgttttc

SEQ ID NO: 24416 - DNA, 25 bp, Homo sapiens
ttggggttctacagtcgtaaaagag

SEQ ID NO: 24417 - DNA, 25 bp, Homo sapiens
aaacctctggcacagcgcaagaagg

SEQ ID NO: 24418 - DNA, 25 bp, Homo sapiens
acactttgatcccttctgttggtgt

SEQ ID NO: 24419 - DNA, 25 bp, Homo sapiens
agacattgagttcaaattgccttca

SEQ ID NO: 24420 - DNA, 25 bp, Homo sapiens
cttccgggccaagacagctcatggc

SEQ ID NO: 24421 - DNA, 25 bp, Homo sapiens
gaagttactttccattgctatctat

SEQ ID NO: 24422 - DNA, 25 bp, Homo sapiens
gacagctcatggcagaggcctcaag

SEQ ID NO: 24423 - DNA, 25 bp, Homo sapiens
gactcgcaatttcacgacacacttt

SEQ ID NO: 24424 - DNA, 25 bp, Homo sapiens
gcctcaagaggcctggcaagaaagg

SEQ ID NO: 24425 - DNA, 25 bp, Homo sapiens
ggagccaaaggccagcagatgagga

SEQ ID NO: 24426 - DNA, 25 bp, Homo sapiens
ggctcaaagtggaacactcgggaga

SEQ ID NO: 24427 - DNA, 25 bp, Homo sapiens
tggatttccttgagggagatcagaa

SEQ ID NO: 24428 - DNA, 25 bp, Homo sapiens
atgcatcccatgaagcccagataca

SEQ ID NO: 24429 - DNA, 25 bp, Homo sapiens
cagggctgtcgccagaactatcatg

SEQ ID NO: 24430 - DNA, 25 bp, Homo sapiens
ccttgtctgccagttgtaccagggc

SEQ ID NO: 24431 - DNA, 25 bp, Homo sapiens
ctagatcaagaatcctgctccacta

SEQ ID NO: 24432 - DNA, 25 bp, Homo sapiens
ggagtgtttgcttcgagtgttggcc

SEQ ID NO: 24433 - DNA, 25 bp, Homo sapiens
ggcaagaagccggatgtctgccctt

SEQ ID NO: 24434 - DNA, 25 bp, Homo sapiens
tccagccaccgcacgagtatgtgcc

SEQ ID NO: 24435 - DNA, 25 bp, Homo sapiens
tgccctgggtcaccgtcaatgggaa

SEQ ID NO: 24436 - DNA, 25 bp, Homo sapiens
tggaggcctgcgtgttggatgaact

SEQ ID NO: 24437 - DNA, 25 bp, Homo sapiens
tggagtgtgcaatgggggaccgcgg

SEQ ID NO: 24438 - DNA, 25 bp, Homo sapiens
ttgacatggagctagccttcctgac

SEQ ID NO: 24439 - DNA, 25 bp, Homo sapiens
agtaccggagacaggtgcagtccct

SEQ ID NO: 24440 - DNA, 25 bp, Homo sapiens
cactattggccgcctgcaggatgag

SEQ ID NO: 24441 - DNA, 25 bp, Homo sapiens
gaagctgctaactaccaagacacta

SEQ ID NO: 24442 - DNA, 25 bp, Homo sapiens
gagaactttgccgttgaagctgcta

SEQ ID NO: 24443 - DNA, 25 bp, Homo sapiens
gcagtccctcacctgtgaagtggat

SEQ ID NO: 24444 - DNA, 25 bp, Homo sapiens
gcccttgacattgagattgccacct

SEQ ID NO: 24445 - DNA, 25 bp, Homo sapiens
gtcaccttcgtgaataccaagacct

SEQ ID NO: 24446 - DNA, 25 bp, Homo sapiens
gtgtggctgccaagaacctgcagga

SEQ ID NO: 24447 - DNA, 25 bp, Homo sapiens
tgagtccctggaacgccagatgcgt

SEQ ID NO: 24448 - DNA, 25 bp, Homo sapiens
tgccctgcgtgacgtacgtcagcaa

SEQ ID NO: 24449 - DNA, 25 bp, Homo sapiens
tgtggatgtttccaagcctgacctc

SEQ ID NO: 24450 - DNA, 25 bp, Homo sapiens
cacagactgtgcgcctcagaaggaa

SEQ ID NO: 24451 - DNA, 25 bp, Homo sapiens
cccagttgttaccctagcaaggcta

SEQ ID NO: 24452 - DNA, 25 bp, Homo sapiens
cttctcacactttctctgaatcatt

SEQ ID NO: 24453 - DNA, 25 bp, Homo sapiens
gaattgctactcgaaggtgccagaa

SEQ ID NO: 24454 - DNA, 25 bp, Homo sapiens
ggacaggggtctgaagtacactgga

SEQ ID NO: 24455 - DNA, 25 bp, Homo sapiens
gtagcatagcttttgtcacggtcac

SEQ ID NO: 24456 - DNA, 25 bp, Homo sapiens
taagaactggtcttctcacactttc

SEQ ID NO: 24457 - DNA, 25 bp, Homo sapiens
tactccaacaggactgagggaccaa

SEQ ID NO: 24458 - DNA, 25 bp, Homo sapiens
tggaggacacagatgactctttggt

SEQ ID NO: 24459 - DNA, 25 bp, Homo sapiens
tttggtgttggtctttttgtctgca

SEQ ID NO: 24460 - DNA, 25 bp, Homo sapiens
ttttgtcacggtcactagctgatcc

SEQ ID NO: 24461 - DNA, 25 bp, Homo sapiens
accagcttgcgaataacagtccccg

SEQ ID NO: 24462 - DNA, 25 bp, Homo sapiens
agttgcctaagcattgcctggcctt

SEQ ID NO: 24463 - DNA, 25 bp, Homo sapiens
caagcccctgtattttgctgatcgg

SEQ ID NO: 24464 - DNA, 25 bp, Homo sapiens
cagaaagcgctgctgtacctgtgtg

SEQ ID NO: 24465 - DNA, 25 bp, Homo sapiens
cgtggccatccctgtgagggtgacg

SEQ ID NO: 24466 - DNA, 25 bp, Homo sapiens
ctcaccatgcttccagctaacaggt

SEQ ID NO: 24467 - DNA, 25 bp, Homo sapiens
ctgatcagaatcatggtctcccgca

SEQ ID NO: 24468 - DNA, 25 bp, Homo sapiens
gaaaatgctttcctgaacctggttc

SEQ ID NO: 24469 - DNA, 25 bp, Homo sapiens
gagggtgacgttagcattaccccca

SEQ ID NO: 24470 - DNA, 25 bp, Homo sapiens
gctgatcggctgtatgactccatga

SEQ ID NO: 24471 - DNA, 25 bp, Homo sapiens
tgtgaaacactttgcctcctgtgta

SEQ ID NO: 24472 - DNA, 25 bp, Homo sapiens
aaaagcctgtgaaaggtgtcttctt

SEQ ID NO: 24473 - DNA, 25 bp, Homo sapiens
aaacccaattcagtctcttctaagc

SEQ ID NO: 24474 - DNA, 25 bp, Homo sapiens
agactgaatcttcctttgttgcaca

SEQ ID NO: 24475 - DNA, 25 bp, Homo sapiens
agtaatctttggctgtaaggcattt

SEQ ID NO: 24476 - DNA, 25 bp, Homo sapiens
attatttctgaatcgagatgtccat

SEQ ID NO: 24477 - DNA, 25 bp, Homo sapiens
catctttccttcgggttggcaaaat

SEQ ID NO: 24478 - DNA, 25 bp, Homo sapiens
gagatgtccatagtcaaatttgtaa

SEQ ID NO: 24479 - DNA, 25 bp, Homo sapiens
gatctgtaatgttatttccacttat

SEQ ID NO: 24480 - DNA, 25 bp, Homo sapiens
ggtgaaccaggggtgttgatggtga

SEQ ID NO: 24481 - DNA, 25 bp, Homo sapiens
gtgatttttttccacaagatctgta

SEQ ID NO: 24482 - DNA, 25 bp, Homo sapiens
gtgtcttctttgacttaatgtcttt

SEQ ID NO: 24483 - DNA, 25 bp, Homo sapiens
aaggagagtggagtggcccaccacc

SEQ ID NO: 24484 - DNA, 25 bp, Homo sapiens
acagaagtctcaccaacttctcaga

SEQ ID NO: 24485 - DNA, 25 bp, Homo sapiens
gaaacctaccacagtaaatgttcca

SEQ ID NO: 24486 - DNA, 25 bp, Homo sapiens
gactgttcctagtttcttagactta

SEQ ID NO: 24487 - DNA, 25 bp, Homo sapiens
gagagcactctatttattgtactgt

SEQ ID NO: 24488 - DNA, 25 bp, Homo sapiens
gggacgctagtaaccatgggcttgc

SEQ ID NO: 24489 - DNA, 25 bp, Homo sapiens
gggcacacgtgtttcacgttgacag

SEQ ID NO: 24490 - DNA, 25 bp, Homo sapiens
ggtcccaccaacagttcagaaacct

SEQ ID NO: 24491 - DNA, 25 bp, Homo sapiens
gttgacaggtttgcttgggacgcta

SEQ ID NO: 24492 - DNA, 25 bp, Homo sapiens
agcttttggctgcgtaactgtgaac

SEQ ID NO: 24493 - DNA, 25 bp, Homo sapiens
cagttcttgactttggacaatccca

SEQ ID NO: 24494 - DNA, 25 bp, Homo sapiens
gagtgaaccagaatgcagttttcct

SEQ ID NO: 24495 - DNA, 25 bp, Homo sapiens
gcagttttccttgagatacctgttt

SEQ ID NO: 24496 - DNA, 25 bp, Homo sapiens
ggaacccagaaccaggctaaggcat

SEQ ID NO: 24497 - DNA, 25 bp, Homo sapiens
ggctaaggcatacagttcttgactt

SEQ ID NO: 24498 - DNA, 25 bp, Homo sapiens
gggaggaagctcccatgttgtttaa

SEQ ID NO: 24499 - DNA, 25 bp, Homo sapiens
gtggtacgaaaacaattcccctgtg

SEQ ID NO: 24500 - DNA, 25 bp, Homo sapiens
tcagccagaggactttggaactgtg

SEQ ID NO: 24501 - DNA, 25 bp, Homo sapiens
tctctgttgagagcatttcagccag

SEQ ID NO: 24502 - DNA, 25 bp, Homo sapiens
ttgaccattttaaaccgttggcaat

SEQ ID NO: 24503 - DNA, 25 bp, Homo sapiens
aaagcttccgtagtgcattggtatg

SEQ ID NO: 24504 - DNA, 25 bp, Homo sapiens
actggtgtttgtttcttagactcat

SEQ ID NO: 24505 - DNA, 25 bp, Homo sapiens
gaaacatacgttattgtacatttgt

SEQ ID NO: 24506 - DNA, 25 bp, Homo sapiens
gaacactgcacagcgatttctttcc

SEQ ID NO: 24507 - DNA, 25 bp, Homo sapiens
gaagcctggtttctgggagaacact

SEQ ID NO: 24508 - DNA, 25 bp, Homo sapiens
gaccagatatgggctacttgtgact

SEQ ID NO: 24509 - DNA, 25 bp, Homo sapiens
tcccaggatttacacaactttaaag

SEQ ID NO: 24510 - DNA, 25 bp, Homo sapiens
tgggcaatagtgactccgtttaata

SEQ ID NO: 24511 - DNA, 25 bp, Homo sapiens
tgtgactagacttttaaactttgct

SEQ ID NO: 24512 - DNA, 25 bp, Homo sapiens
tttgccacttctgcattatttagaa

SEQ ID NO: 24513 - DNA, 25 bp, Homo sapiens
tttgctctttcaagcagaagcctgg

SEQ ID NO: 24514 - DNA, 25 bp, Homo sapiens
aggctgctgtgaaagaggctggcta

SEQ ID NO: 24515 - DNA, 25 bp, Homo sapiens
caacaacgaaggacttttctccctg

SEQ ID NO: 24516 - DNA, 25 bp, Homo sapiens
ccaccatggccaacaacgaaggact

SEQ ID NO: 24517 - DNA, 25 bp, Homo sapiens
ccctggtggcgaggaagctgagcag

SEQ ID NO: 24518 - DNA, 25 bp, Homo sapiens
cgcaaagttattcttccaccatggc

SEQ ID NO: 24519 - DNA, 25 bp, Homo sapiens
ctactacatgattggtgagcagaag

SEQ ID NO: 24520 - DNA, 25 bp, Homo sapiens
cttttctccctggtggcgaggaagc

SEQ ID NO: 24521 - DNA, 25 bp, Homo sapiens
gaatggtttgaggtgatctcgcaaa

SEQ ID NO: 24522 - DNA, 25 bp, Homo sapiens
gaggctggctacacaatcgaatggt

SEQ ID NO: 24523 - DNA, 25 bp, Homo sapiens
gatctcgcaaagttattcttccacc

SEQ ID NO: 24524 - DNA, 25 bp, Homo sapiens
gattggtgagcagaagttctccagc

SEQ ID NO: 24525 - DNA, 25 bp, Homo sapiens
agggaacagagtcaagggtccagag

SEQ ID NO: 24526 - DNA, 25 bp, Homo sapiens
cctttgactggtccccagtggtgac

SEQ ID NO: 24527 - DNA, 25 bp, Homo sapiens
ctatgtgtgtgatcttgaagggaac

SEQ ID NO: 24528 - DNA, 25 bp, Homo sapiens
gacaggcggtcaagcaggtgctgaa

SEQ ID NO: 24529 - DNA, 25 bp, Homo sapiens
gactactcagaccagaacctgcagg

SEQ ID NO: 24530 - DNA, 25 bp, Homo sapiens
ggaggagaagttgagacaggcggtc

SEQ ID NO: 24531 - DNA, 25 bp, Homo sapiens
ggatgcgctcaagagcagctactac

SEQ ID NO: 24532 - DNA, 25 bp, Homo sapiens
ggcttcctggtgatcatggatgcgc

SEQ ID NO: 24533 - DNA, 25 bp, Homo sapiens
gtgatgtgactcagagccagccact

SEQ ID NO: 24534 - DNA, 25 bp, Homo sapiens
tccccagtggtgacctatgtgtgtg

SEQ ID NO: 24535 - DNA, 25 bp, Homo sapiens
tcgtcactgactactcagaccagaa

SEQ ID NO: 24536 - DNA, 25 bp, Homo sapiens
aaggcagcctccttaaatgttttct

SEQ ID NO: 24537 - DNA, 25 bp, Homo sapiens
aagtgtgactttttctcggagcata

SEQ ID NO: 24538 - DNA, 25 bp, Homo sapiens
aatgctttcttgtctttagactcaa

SEQ ID NO: 24539 - DNA, 25 bp, Homo sapiens
agccctgtgttgtgctcaggactca

SEQ ID NO: 24540 - DNA, 25 bp, Homo sapiens
ctcttcctttccaattttgcttata

SEQ ID NO: 24541 - DNA, 25 bp, Homo sapiens
gaccagctaaaattttcgacttgac

SEQ ID NO: 24542 - DNA, 25 bp, Homo sapiens
gcttagggaacgtttcatttctcat

SEQ ID NO: 24543 - DNA, 25 bp, Homo sapiens
tctctctttgatcccataaagctac

SEQ ID NO: 24544 - DNA, 25 bp, Homo sapiens
tgaagttcacctatcccattttagc

SEQ ID NO: 24545 - DNA, 25 bp, Homo sapiens
tgctgctggtggaaactcatggctt

SEQ ID NO: 24546 - DNA, 25 bp, Homo sapiens
tttacagttccttcaataaccatga

SEQ ID NO: 24547 - DNA, 25 bp, Homo sapiens
aaatatttgtgttcccagtacctca

SEQ ID NO: 24548 - DNA, 25 bp, Homo sapiens
attacggcttttctattgctgtatg

SEQ ID NO: 24549 - DNA, 25 bp, Homo sapiens
cttcacccttcgtaaccaggagaca

SEQ ID NO: 24550 - DNA, 25 bp, Homo sapiens
gacaaggcggccatggatttgccct

SEQ ID NO: 24551 - DNA, 25 bp, Homo sapiens
gatttgcccttgattctattttgct

SEQ ID NO: 24552 - DNA, 25 bp, Homo sapiens
ggtaggtgacacgtggactctagta

SEQ ID NO: 24553 - DNA, 25 bp, Homo sapiens
gttcggatttgactgcctgtatatg

SEQ ID NO: 24554 - DNA, 25 bp, Homo sapiens
taatgtttttgtcctaatctcttca

SEQ ID NO: 24555 - DNA, 25 bp, Homo sapiens
tcccagtacctcacttgttcggatt

SEQ ID NO: 24556 - DNA, 25 bp, Homo sapiens
tcttggatgctttatgcctgcgcac

SEQ ID NO: 24557 - DNA, 25 bp, Homo sapiens
tgcatggtggggatctatggcctct

SEQ ID NO: 24558 - DNA, 25 bp, Homo sapiens
agggatctgcaggactgcagccatg

SEQ ID NO: 24559 - DNA, 25 bp, Homo sapiens
caaggagcgcgagatggtggccaca

SEQ ID NO: 24560 - DNA, 25 bp, Homo sapiens
ccgaacgcaaggagcgcgagatggt

SEQ ID NO: 24561 - DNA, 25 bp, Homo sapiens
cggctgctcaagtgcaagcgtgaca

SEQ ID NO: 24562 - DNA, 25 bp, Homo sapiens
ctgcaggactgcagccatgggggcg

SEQ ID NO: 24563 - DNA, 25 bp, Homo sapiens
ctgctcaagtgcaagcgtgacagct

SEQ ID NO: 24564 - DNA, 25 bp, Homo sapiens
gcaaggagcgcgagatggtggccac

SEQ ID NO: 24565 - DNA, 25 bp, Homo sapiens
ggctgctcaagtgcaagcgtgacag

SEQ ID NO: 24566 - DNA, 25 bp, Homo sapiens
tatgtgatgcgcatgaaggagtttg

SEQ ID NO: 24567 - DNA, 25 bp, Homo sapiens
tcaagtgcaagcgtgacagcttccc

SEQ ID NO: 24568 - DNA, 25 bp, Homo sapiens
tgctccagcggaagaagcggcggga

SEQ ID NO: 24569 - DNA, 25 bp, Homo sapiens
atcacttgggatctttgacacttga

SEQ ID NO: 24570 - DNA, 25 bp, Homo sapiens
ccatctgggtcttccatctagaact

SEQ ID NO: 24571 - DNA, 25 bp, Homo sapiens
cccccatcgtgtactgcagagttga

SEQ ID NO: 24572 - DNA, 25 bp, Homo sapiens
cctggcagctgcgtttaagccttcc

SEQ ID NO: 24573 - DNA, 25 bp, Homo sapiens
gaaggaagaggcacgtgctcctcag

SEQ ID NO: 24574 - DNA, 25 bp, Homo sapiens
ggaggtggtttgtgtatcttactgg

SEQ ID NO: 24575 - DNA, 25 bp, Homo sapiens
ggcagctatcttacagacgcatgaa

SEQ ID NO: 24576 - DNA, 25 bp, Homo sapiens
gtatcttgtttttctgatcggagca

SEQ ID NO: 24577 - DNA, 25 bp, Homo sapiens
tactgacctgttgtaggcagctatc

SEQ ID NO: 24578 - DNA, 25 bp, Homo sapiens
tccccgggaggagtgccatctgggt

SEQ ID NO: 24579 - DNA, 25 bp, Homo sapiens
tgatcggagcatcactactgacctg

SEQ ID NO: 24580 - DNA, 25 bp, Homo sapiens
atttacgtgaccatttgattctcaa

SEQ ID NO: 24581 - DNA, 25 bp, Homo sapiens
caaccggaaatgatcacttagaaaa

SEQ ID NO: 24582 - DNA, 25 bp, Homo sapiens
gaacaggtgcatttaaacaaccgga

SEQ ID NO: 24583 - DNA, 25 bp, Homo sapiens
gatgaactttgatttgaacaggtgc

SEQ ID NO: 24584 - DNA, 25 bp, Homo sapiens
gcttatttgttttgtcatttacgtg

SEQ ID NO: 24585 - DNA, 25 bp, Homo sapiens
gtagccagtggaacaaagtttgtag

SEQ ID NO: 24586 - DNA, 25 bp, Homo sapiens
gtttattctactgcagtagccagtg

SEQ ID NO: 24587 - DNA, 25 bp, Homo sapiens
tagttattttgccacttacttttct

SEQ ID NO: 24588 - DNA, 25 bp, Homo sapiens
tgtcattatatgcttatttgttttg

SEQ ID NO: 24589 - DNA, 25 bp, Homo sapiens
tgttttgtcatttacgtgaccattt

SEQ ID NO: 24590 - DNA, 25 bp, Homo sapiens
ttgtagttattttgccacttacttt

SEQ ID NO: 24591 - DNA, 25 bp, Homo sapiens
aagtgggatcaactgtacgcctttg

SEQ ID NO: 24592 - DNA, 25 bp, Homo sapiens
agaacttattttgtgcctagagctc

SEQ ID NO: 24593 - DNA, 25 bp, Homo sapiens
atcaggcctgattctacttttgaaa

SEQ ID NO: 24594 - DNA, 25 bp, Homo sapiens
ctctgtccactttctgaatgagaac

SEQ ID NO: 24595 - DNA, 25 bp, Homo sapiens
gaccataaagtcttttgctccgctg

SEQ ID NO: 24596 - DNA, 25 bp, Homo sapiens
gagctctcactcactgataatgctt

SEQ ID NO: 24597 - DNA, 25 bp, Homo sapiens
gataatgcttattaccttctgggca

SEQ ID NO: 24598 - DNA, 25 bp, Homo sapiens
gtacgcctttggtatctgaccataa

SEQ ID NO: 24599 - DNA, 25 bp, Homo sapiens
taatacatcctttcactcagcagag

SEQ ID NO: 24600 - DNA, 25 bp, Homo sapiens
tagcttcttctcattcatgcagtaa

SEQ ID NO: 24601 - DNA, 25 bp, Homo sapiens
ttttgctccgctgacatttgggtga

SEQ ID NO: 24602 - DNA, 25 bp, Homo sapiens
ccctctgcagactgggcttagcgtg

SEQ ID NO: 24603 - DNA, 25 bp, Homo sapiens
ggctgggcccatattggtttgtgtt

SEQ ID NO: 24604 - DNA, 25 bp, Homo sapiens
gggcgacagaggggcactggtttac

SEQ ID NO: 24605 - DNA, 25 bp, Homo sapiens
ggtggcggctgagaagtgcctttag

SEQ ID NO: 24606 - DNA, 25 bp, Homo sapiens
gtattccactgtactcattcataag

SEQ ID NO: 24607 - DNA, 25 bp, Homo sapiens
gtgccaagggtaagctggcctgctg

SEQ ID NO: 24608 - DNA, 25 bp, Homo sapiens
tacactttgccgggaccatcagggc

SEQ ID NO: 24609 - DNA, 25 bp, Homo sapiens
tacctgatagacacattcctctctg

SEQ ID NO: 24610 - DNA, 25 bp, Homo sapiens
tcatctctcttgtctatacctgata

SEQ ID NO: 24611 - DNA, 25 bp, Homo sapiens
tgggcttagcgtgagcaggcacttc

SEQ ID NO: 24612 - DNA, 25 bp, Homo sapiens
tttccaactacggagtgtcactgct

SEQ ID NO: 24613 - DNA, 25 bp, Homo sapiens
actcatcccactccacataaggggt

SEQ ID NO: 24614 - DNA, 25 bp, Homo sapiens
atagtcatcacatttctatgccaaa

SEQ ID NO: 24615 - DNA, 25 bp, Homo sapiens
caggaaatagtcactcatcccactc

SEQ ID NO: 24616 - DNA, 25 bp, Homo sapiens
cgttgtgttgttttgctgcactttt

SEQ ID NO: 24617 - DNA, 25 bp, Homo sapiens
gaaaccctgcacttagctagaacct

SEQ ID NO: 24618 - DNA, 25 bp, Homo sapiens
ggaacgatccataactttagtctta

SEQ ID NO: 24619 - DNA, 25 bp, Homo sapiens
gtagcgactgtcaacagcgtgcagg

SEQ ID NO: 24620 - DNA, 25 bp, Homo sapiens
gtattcccgagacaacgaagcgttg

SEQ ID NO: 24621 - DNA, 25 bp, Homo sapiens
gtgttgtggggtcaaccgtacaatg

SEQ ID NO: 24622 - DNA, 25 bp, Homo sapiens
ttgcgtgtggagctgtattcccgag

SEQ ID NO: 24623 - DNA, 25 bp, Homo sapiens
tttcccctttctgttaatagtcatc

SEQ ID NO: 24624 - DNA, 25 bp, Homo sapiens
aagcgcctggcagtgtaccaggccg

SEQ ID NO: 24625 - DNA, 25 bp, Homo sapiens
agcaggcccagcagatacgcctgca

SEQ ID NO: 24626 - DNA, 25 bp, Homo sapiens
ccctggtggaacagggccgcgtgcg

SEQ ID NO: 24627 - DNA, 25 bp, Homo sapiens
gaagcgcctggcagtgtaccaggcc

SEQ ID NO: 24628 - DNA, 25 bp, Homo sapiens
gcccagcgacaatcactgaacgccg

SEQ ID NO: 24629 - DNA, 25 bp, Homo sapiens
gcgacaatcactgaacgccgaagcc

SEQ ID NO: 24630 - DNA, 25 bp, Homo sapiens
gcgcgcgcggatggaggagatgggc

SEQ ID NO: 24631 - DNA, 25 bp, Homo sapiens
ggcccctggtggaacagggccgcgt

SEQ ID NO: 24632 - DNA, 25 bp, Homo sapiens
gtgcccagcgacaatcactgaacgc

SEQ ID NO: 24633 - DNA, 25 bp, Homo sapiens
tggggcccctggtggaacagggccg

SEQ ID NO: 24634 - DNA, 25 bp, Homo sapiens
tggtggaagacatgcagcgccagtg

SEQ ID NO: 24635 - DNA, 25 bp, Homo sapiens
aagtttctcggtgtgttctgttaat

SEQ ID NO: 24636 - DNA, 25 bp, Homo sapiens
actgcatcgagatccaaccgactga

SEQ ID NO: 24637 - DNA, 25 bp, Homo sapiens
aggggatttgcttccttgttatgta

SEQ ID NO: 24638 - DNA, 25 bp, Homo sapiens
ctgtctctctctcagtacagttcaa

SEQ ID NO: 24639 - DNA, 25 bp, Homo sapiens
gcatcctataaactgcctgcagacg

SEQ ID NO: 24640 - DNA, 25 bp, Homo sapiens
ggagcacctgcatccaagagcatgc

SEQ ID NO: 24641 - DNA, 25 bp, Homo sapiens
ggagggatttttcaggtttcagcat

SEQ ID NO: 24642 - DNA, 25 bp, Homo sapiens
gtacccacacagatagcattcaaca

SEQ ID NO: 24643 - DNA, 25 bp, Homo sapiens
gtgtatagtgttttaccctcttctt

SEQ ID NO: 24644 - DNA, 25 bp, Homo sapiens
taacttgcaacttcataacttcttt

SEQ ID NO: 24645 - DNA, 25 bp, Homo sapiens
tgcagacgttagcaggctcttcaaa

SEQ ID NO: 24646 - DNA, 25 bp, Homo sapiens
aagggcatttaatcaggaggaaagg

SEQ ID NO: 24647 - DNA, 25 bp, Homo sapiens
acgtaatttccacttgggactagat

SEQ ID NO: 24648 - DNA, 25 bp, Homo sapiens
actaatcataagctgcctaggcagc

SEQ ID NO: 24649 - DNA, 25 bp, Homo sapiens
actggggcctgtgtagccagtgggt

SEQ ID NO: 24650 - DNA, 25 bp, Homo sapiens
agctgcctaggcagccagctacagg

SEQ ID NO: 24651 - DNA, 25 bp, Homo sapiens
ggaaaactaactcaggtgtatttat

SEQ ID NO: 24652 - DNA, 25 bp, Homo sapiens
ggcagccagctacaggcttgagctt

SEQ ID NO: 24653 - DNA, 25 bp, Homo sapiens
ggcttgagctttaaattcatggttt

SEQ ID NO: 24654 - DNA, 25 bp, Homo sapiens
ggtgctattctgtgaaactaatcat

SEQ ID NO: 24655 - DNA, 25 bp, Homo sapiens
gtagccagtgggtgctattctgtga

SEQ ID NO: 24656 - DNA, 25 bp, Homo sapiens
tccacttgggactagatcacaactg

SEQ ID NO: 24657 - DNA, 25 bp, Homo sapiens
aacaatttttgttcaatgcccaccg

SEQ ID NO: 24658 - DNA, 25 bp, Homo sapiens
agaaatgatgtggaccttgctggaa

SEQ ID NO: 24659 - DNA, 25 bp, Homo sapiens
ctccagtactttggttgacccttgt

SEQ ID NO: 24660 - DNA, 25 bp, Homo sapiens
gaactaggctcatcagaatcgtgac

SEQ ID NO: 24661 - DNA, 25 bp, Homo sapiens
gaatcgtgactattattgctccatc

SEQ ID NO: 24662 - DNA, 25 bp, Homo sapiens
ggttgacccttgtatgtcacagctc

SEQ ID NO: 24663 - DNA, 25 bp, Homo sapiens
gtcacagctctgctctatttattat

SEQ ID NO: 24664 - DNA, 25 bp, Homo sapiens
gttcaatgcccaccgagacatatag

SEQ ID NO: 24665 - DNA, 25 bp, Homo sapiens
tatagcataaaaacctccagtactt

SEQ ID NO: 24666 - DNA, 25 bp, Homo sapiens
tatttagtcaaaccaccttttatgt

SEQ ID NO: 24667 - DNA, 25 bp, Homo sapiens
tgatacatgtgtcccttataggctc

SEQ ID NO: 24668 - DNA, 25 bp, Homo sapiens
aaggctgcgaatgggatcctgatgg

SEQ ID NO: 24669 - DNA, 25 bp, Homo sapiens
ccaatgtcgaactcttctttgctgc

SEQ ID NO: 24670 - DNA, 25 bp, Homo sapiens
gcatttccagcctatctaatttctt

SEQ ID NO: 24671 - DNA, 25 bp, Homo sapiens
ggagccttagaggtctttaatcatt

SEQ ID NO: 24672 - DNA, 25 bp, Homo sapiens
ggctgcttttatgtagtttaggctg

SEQ ID NO: 24673 - DNA, 25 bp, Homo sapiens
ggctggaaatggtttcacttgctct

SEQ ID NO: 24674 - DNA, 25 bp, Homo sapiens
ggtgcagtttgcttctacatgatgc

SEQ ID NO: 24675 - DNA, 25 bp, Homo sapiens
gtataccagcctactgtactattta

SEQ ID NO: 24676 - DNA, 25 bp, Homo sapiens
tagttttctatttgcctccagtgca

SEQ ID NO: 24677 - DNA, 25 bp, Homo sapiens
tgccgtgctcccaaaacattttaaa

SEQ ID NO: 24678 - DNA, 25 bp, Homo sapiens
tttcagcaccgatggccatgtaaat

SEQ ID NO: 24679 - DNA, 25 bp, Homo sapiens
aaagaagctgtgaccccagcaggat

SEQ ID NO: 24680 - DNA, 25 bp, Homo sapiens
accccagcaggatgtctaatatgtg

SEQ ID NO: 24681 - DNA, 25 bp, Homo sapiens
gagaatctaagtcaaactcactatt

SEQ ID NO: 24682 - DNA, 25 bp, Homo sapiens
gagatgtccacctaaaattcatatg

SEQ ID NO: 24683 - DNA, 25 bp, Homo sapiens
gcagtatgctgctgtggttagaagc

SEQ ID NO: 24684 - DNA, 25 bp, Homo sapiens
gcatgtacccacccaaaatgattat

SEQ ID NO: 24685 - DNA, 25 bp, Homo sapiens
ggggtttgcatttagatcatttagc

SEQ ID NO: 24686 - DNA, 25 bp, Homo sapiens
ggtcaccagatcctagtgtagttct

SEQ ID NO: 24687 - DNA, 25 bp, Homo sapiens
gtgacaaaattatctcgaccttaca

SEQ ID NO: 24688 - DNA, 25 bp, Homo sapiens
gtgtactggtttgcatgtacccacc

SEQ ID NO: 24689 - DNA, 25 bp, Homo sapiens
tagctactgtttgcaatgtcttatt

SEQ ID NO: 24690 - DNA, 25 bp, Homo sapiens
aagattgaagcctttgccagccatt

SEQ ID NO: 24691 - DNA, 25 bp, Homo sapiens
aagcccaatatcagctctttctctt

SEQ ID NO: 24692 - DNA, 25 bp, Homo sapiens
caaactcctcaactgggaaccttca

SEQ ID NO: 24693 - DNA, 25 bp, Homo sapiens
cctgccttatcctgttctataacag

SEQ ID NO: 24694 - DNA, 25 bp, Homo sapiens
gcatgtttctcccatttagaatatc

SEQ ID NO: 24695 - DNA, 25 bp, Homo sapiens
gccaagtatctttccagcatgtttc

SEQ ID NO: 24696 - DNA, 25 bp, Homo sapiens
gggaaccttcatatgtgcagtattt

SEQ ID NO: 24697 - DNA, 25 bp, Homo sapiens
gggacataagttcattcatgccaag

SEQ ID NO: 24698 - DNA, 25 bp, Homo sapiens
gtatctgggagatgacctgccttat

SEQ ID NO: 24699 - DNA, 25 bp, Homo sapiens
gtgttcctatcaaagtgtcgtatct

SEQ ID NO: 24700 - DNA, 25 bp, Homo sapiens
tctttctactctcctatttgtattt

SEQ ID NO: 24701 - DNA, 25 bp, Homo sapiens
acagcccattgcagcactgtgctgg

SEQ ID NO: 24702 - DNA, 25 bp, Homo sapiens
ccagcctctgctggtagcatgtcgc

SEQ ID NO: 24703 - DNA, 25 bp, Homo sapiens
cctgtccctgactattgagtcctgt

SEQ ID NO: 24704 - DNA, 25 bp, Homo sapiens
gccctgccactgttgctagtcaggg

SEQ ID NO: 24705 - DNA, 25 bp, Homo sapiens
taagcagttgaaggttccccaccat

SEQ ID NO: 24706 - DNA, 25 bp, Homo sapiens
tgctctgaccgtgtgggtggtgatc

SEQ ID NO: 24707 - DNA, 25 bp, Homo sapiens
tgtgtttcaggatcttcgggctgtc

SEQ ID NO: 24708 - DNA, 25 bp, Homo sapiens
ttctcccacttacactgttgacatc

SEQ ID NO: 24709 - DNA, 25 bp, Homo sapiens
ttgctagtcaggggcttggttctcc

SEQ ID NO: 24710 - DNA, 25 bp, Homo sapiens
aaatgctcaccacttagcctgtttt

SEQ ID NO: 24711 - DNA, 25 bp, Homo sapiens
aaatgtacaagtcctttcagtgatg

SEQ ID NO: 24712 - DNA, 25 bp, Homo sapiens
aactaggacactaactgggttccat

SEQ ID NO: 24713 - DNA, 25 bp, Homo sapiens
cataacaacactgggccttcttaac

SEQ ID NO: 24714 - DNA, 25 bp, Homo sapiens
gattgccctttcatatgatcttcta

SEQ ID NO: 24715 - DNA, 25 bp, Homo sapiens
gggtggtaatattggcattctgatt

SEQ ID NO: 24716 - DNA, 25 bp, Homo sapiens
gttctgtttacctagtgtcttactc

SEQ ID NO: 24717 - DNA, 25 bp, Homo sapiens
tagtgtcttactctgttttctggat

SEQ ID NO: 24718 - DNA, 25 bp, Homo sapiens
tcttagtgctaataccttgcctctt

SEQ ID NO: 24719 - DNA, 25 bp, Homo sapiens
tgggttccatgtgattgccctttca

SEQ ID NO: 24720 - DNA, 25 bp, Homo sapiens
ttttcttttagctcctctgtggtga

SEQ ID NO: 24721 - DNA, 25 bp, Homo sapiens
acactttgggacttgggagctgggg

SEQ ID NO: 24722 - DNA, 25 bp, Homo sapiens
accctcgacaagaccacactttggg

SEQ ID NO: 24723 - DNA, 25 bp, Homo sapiens
attcgaaccactgagagcgagatgg

SEQ ID NO: 24724 - DNA, 25 bp, Homo sapiens
attttgttacttgcacttgttattc

SEQ ID NO: 24725 - DNA, 25 bp, Homo sapiens
ccccatcacggagggtccagactgt

SEQ ID NO: 24726 - DNA, 25 bp, Homo sapiens
ctggggctgaagttgctctgtaccc

SEQ ID NO: 24727 - DNA, 25 bp, Homo sapiens
gcgtctgcatacgagagacttggtt

SEQ ID NO: 24728 - DNA, 25 bp, Homo sapiens
tacccatgaactcccagtttgcgaa

SEQ ID NO: 24729 - DNA, 25 bp, Homo sapiens
tccagactgtccactcgggggtgga

SEQ ID NO: 24730 - DNA, 25 bp, Homo sapiens
tgcacttgttattcgaaccactgag

SEQ ID NO: 24731 - DNA, 25 bp, Homo sapiens
tggagtgagactgactgcaagcccc

SEQ ID NO: 24732 - DNA, 25 bp, Homo sapiens
agcatcagctgggctgctttctttg

SEQ ID NO: 24733 - DNA, 25 bp, Homo sapiens
agcatgtgttctttagggccttgta

SEQ ID NO: 24734 - DNA, 25 bp, Homo sapiens
aggacttccaggcgcatagggtaga

SEQ ID NO: 24735 - DNA, 25 bp, Homo sapiens
atgacaccagctgtctgtactagac

SEQ ID NO: 24736 - DNA, 25 bp, Homo sapiens
gaaagagcagtatgccacttcttaa

SEQ ID NO: 24737 - DNA, 25 bp, Homo sapiens
gagatttgctccattctctttggaa

SEQ ID NO: 24738 - DNA, 25 bp, Homo sapiens
gcagggactgggattcgaggacttc

SEQ ID NO: 24739 - DNA, 25 bp, Homo sapiens
ggctgtttccttttgcatctggaac

SEQ ID NO: 24740 - DNA, 25 bp, Homo sapiens
gtgtggccccaggtgtcaaaatgac

SEQ ID NO: 24741 - DNA, 25 bp, Homo sapiens
gtttctcttggcagcatcagctggg

SEQ ID NO: 24742 - DNA, 25 bp, Homo sapiens
tacagcctacccatgcagggactgg

SEQ ID NO: 24743 - DNA, 25 bp, Homo sapiens
aaatgggctgggagtgcttctgtcc

SEQ ID NO: 24744 - DNA, 25 bp, Homo sapiens
agtcagaatgactcgacctgtcctt

SEQ ID NO: 24745 - DNA, 25 bp, Homo sapiens
atgccaggatatttttccgcaaatc

SEQ ID NO: 24746 - DNA, 25 bp, Homo sapiens
atttttccgcaaatcagtcggttga

SEQ ID NO: 24747 - DNA, 25 bp, Homo sapiens
gaaatgggctgggagtgcttctgtc

SEQ ID NO: 24748 - DNA, 25 bp, Homo sapiens
gacctgtccttcaatgttgataata

SEQ ID NO: 24749 - DNA, 25 bp, Homo sapiens
ggatatttttccgcaaatcagtcgg

SEQ ID NO: 24750 - DNA, 25 bp, Homo sapiens
gtcggttgaaattcagaggagtcag

SEQ ID NO: 24751 - DNA, 25 bp, Homo sapiens
tccatgccaggatatttttccgcaa

SEQ ID NO: 24752 - DNA, 25 bp, Homo sapiens
tccgcaaatcagtcggttgaaattc

SEQ ID NO: 24753 - DNA, 25 bp, Homo sapiens
tcgacctgtccttcaatgttgataa

SEQ ID NO: 24754 - DNA, 25 bp, Homo sapiens
aaaggcttccaggctgagagccggc

SEQ ID NO: 24755 - DNA, 25 bp, Homo sapiens
ccctgcacatgaagaggcacctctg

SEQ ID NO: 24756 - DNA, 25 bp, Homo sapiens
ctcccactgtgacaggtgtttttcc

SEQ ID NO: 24757 - DNA, 25 bp, Homo sapiens
gaaggagggatgcgtggttccagcc

SEQ ID NO: 24758 - DNA, 25 bp, Homo sapiens
gagtggcgttttgcaagaagtgatg

SEQ ID NO: 24759 - DNA, 25 bp, Homo sapiens
gatgagttaaccaggcacttccgaa

SEQ ID NO: 24760 - DNA, 25 bp, Homo sapiens
gcagagaggtggatcctgtaggcta

SEQ ID NO: 24761 - DNA, 25 bp, Homo sapiens
ggccaagccttttaaatgctcccac

SEQ ID NO: 24762 - DNA, 25 bp, Homo sapiens
gttgaggatctattactgaccgtat

SEQ ID NO: 24763 - DNA, 25 bp, Homo sapiens
tgagagccggccgtggaaggaggga

SEQ ID NO: 24764 - DNA, 25 bp, Homo sapiens
ttatgtgggtgaccctggactcgcc

SEQ ID NO: 24765 - DNA, 25 bp, Homo sapiens
aggggaccacatagtctctgttggc

SEQ ID NO: 24766 - DNA, 25 bp, Homo sapiens
atggactactatgactctgaacacc

SEQ ID NO: 24767 - DNA, 25 bp, Homo sapiens
catttctttgtggtgtctgtctgga

SEQ ID NO: 24768 - DNA, 25 bp, Homo sapiens
gaaatagttccctttcgagttgcag

SEQ ID NO: 24769 - DNA, 25 bp, Homo sapiens
gaccattttccttaacttgcatcag

SEQ ID NO: 24770 - DNA, 25 bp, Homo sapiens
gcgcaaacttgctcgagaaggccag

SEQ ID NO: 24771 - DNA, 25 bp, Homo sapiens
gcttaggctgttaacccagtcactc

SEQ ID NO: 24772 - DNA, 25 bp, Homo sapiens
gcttggaccgtgctgacagaatact

SEQ ID NO: 24773 - DNA, 25 bp, Homo sapiens
gtctgtctggacatgcttcctaaaa

SEQ ID NO: 24774 - DNA, 25 bp, Homo sapiens
gttttggtctgccttatgagttctg

SEQ ID NO: 24775 - DNA, 25 bp, Homo sapiens
tcactccacctttgacacattacta

SEQ ID NO: 24776 - DNA, 25 bp, Homo sapiens
aaattttagcgtgctcactgacctg

SEQ ID NO: 24777 - DNA, 25 bp, Homo sapiens
aatgtaaagcttgtctgatcgttca

SEQ ID NO: 24778 - DNA, 25 bp, Homo sapiens
agagactgagtcaagttgttcctta

SEQ ID NO: 24779 - DNA, 25 bp, Homo sapiens
agcagactcagctctgacattctga

SEQ ID NO: 24780 - DNA, 25 bp, Homo sapiens
agctaggatgtgcattctccagcca

SEQ ID NO: 24781 - DNA, 25 bp, Homo sapiens
atcatcagatcgactcttatacgag

SEQ ID NO: 24782 - DNA, 25 bp, Homo sapiens
atcggaatcctgtcgattagactgg

SEQ ID NO: 24783 - DNA, 25 bp, Homo sapiens
gacagtccgtcaaaacagattgttt

SEQ ID NO: 24784 - DNA, 25 bp, Homo sapiens
gcaaaggggaggcatcagtgtcttg

SEQ ID NO: 24785 - DNA, 25 bp, Homo sapiens
gttagcctcaatttctgaacaccat

SEQ ID NO: 24786 - DNA, 25 bp, Homo sapiens
tagactggacagcttgtggcaagtg

SEQ ID NO: 24787 - DNA, 25 bp, Homo sapiens
aatccctgtaggcgtgctagcaatt

SEQ ID NO: 24788 - DNA, 25 bp, Homo sapiens
acttcacattgcaaacgccttttat

SEQ ID NO: 24789 - DNA, 25 bp, Homo sapiens
agtgtgggactgacatttctcaatg

SEQ ID NO: 24790 - DNA, 25 bp, Homo sapiens
ccacaggacctcctgtagtagcccc

SEQ ID NO: 24791 - DNA, 25 bp, Homo sapiens
gacagctgcttgttggattccagtg

SEQ ID NO: 24792 - DNA, 25 bp, Homo sapiens
gtccacaccgagcccagtgtgggac

SEQ ID NO: 24793 - DNA, 25 bp, Homo sapiens
gtggtccgggtttggcagatttgat

SEQ ID NO: 24794 - DNA, 25 bp, Homo sapiens
tacaagctcagatgtctctgctctc

SEQ ID NO: 24795 - DNA, 25 bp, Homo sapiens
tagcaattccagggtggtccgggtt

SEQ ID NO: 24796 - DNA, 25 bp, Homo sapiens
tgcaggtacctgcgatgtttacgtc

SEQ ID NO: 24797 - DNA, 25 bp, Homo sapiens
tgctctcctgaatcttgggcatgcc

SEQ ID NO: 24798 - DNA, 25 bp, Homo sapiens
actcgccctctatccgtagagtagt

SEQ ID NO: 24799 - DNA, 25 bp, Homo sapiens
attgacgcatatttaactcgccctc

SEQ ID NO: 24800 - DNA, 25 bp, Homo sapiens
cttccactgtacacgctgtatatag

SEQ ID NO: 24801 - DNA, 25 bp, Homo sapiens
gagacttaacttatcttgctctgtc

SEQ ID NO: 24802 - DNA, 25 bp, Homo sapiens
gatggttcgtgttcatactgcagct

SEQ ID NO: 24803 - DNA, 25 bp, Homo sapiens
gggtacgtattgtttctggatatca

SEQ ID NO: 24804 - DNA, 25 bp, Homo sapiens
tacattttgcctgacttaccttaaa

SEQ ID NO: 24805 - DNA, 25 bp, Homo sapiens
taggggtcaatgtgatgctgctgga

SEQ ID NO: 24806 - DNA, 25 bp, Homo sapiens
tcatggatgccctccttaatagcca

SEQ ID NO: 24807 - DNA, 25 bp, Homo sapiens
ttgggtctttgtacattttgcctga

SEQ ID NO: 24808 - DNA, 25 bp, Homo sapiens
tttcctctatcctgtacatttcaca

SEQ ID NO: 24809 - DNA, 25 bp, Homo sapiens
actcaggcgggacagtgctgcagct

SEQ ID NO: 24810 - DNA, 25 bp, Homo sapiens
agatgcgcattctaacctggaggtc

SEQ ID NO: 24811 - DNA, 25 bp, Homo sapiens
agcctggctggttttatctgagtga

SEQ ID NO: 24812 - DNA, 25 bp, Homo sapiens
cctattccaagcttccatagctgct

SEQ ID NO: 24813 - DNA, 25 bp, Homo sapiens
ctggatggtgtgccttccagatcct

SEQ ID NO: 24814 - DNA, 25 bp, Homo sapiens
gagcagcaggtagcctggctggttt

SEQ ID NO: 24815 - DNA, 25 bp, Homo sapiens
gattgtagtggatctaatttttcag

SEQ ID NO: 24816 - DNA, 25 bp, Homo sapiens
gcattgctgactgtgtatataggat

SEQ ID NO: 24817 - DNA, 25 bp, Homo sapiens
gtcccggctctgtgggtgatgggga

SEQ ID NO: 24818 - DNA, 25 bp, Homo sapiens
tgctctgtttgtggggtgacgggac

SEQ ID NO: 24819 - DNA, 25 bp, Homo sapiens
tggggctgtgttttgagcagcaggt

SEQ ID NO: 24820 - DNA, 25 bp, Homo sapiens
aacctgttggtaaagtgcccatctg

SEQ ID NO: 24821 - DNA, 25 bp, Homo sapiens
agatctccacattgtcttgatccag

SEQ ID NO: 24822 - DNA, 25 bp, Homo sapiens
caggtgtgcatagctctctgtagac

SEQ ID NO: 24823 - DNA, 25 bp, Homo sapiens
gatccagaccagctctgtgatcaga

SEQ ID NO: 24824 - DNA, 25 bp, Homo sapiens
gctgggctgcgagagtgttgctgcc

SEQ ID NO: 24825 - DNA, 25 bp, Homo sapiens
ggttgccttgaatgtggactctgga

SEQ ID NO: 24826 - DNA, 25 bp, Homo sapiens
tagacatttttacccaaacctgttg

SEQ ID NO: 24827 - DNA, 25 bp, Homo sapiens
tcaagcctgtgctcaggttgccttg

SEQ ID NO: 24828 - DNA, 25 bp, Homo sapiens
tcggacactggccttgggaacaatg

SEQ ID NO: 24829 - DNA, 25 bp, Homo sapiens
tgcccatctggtgctcaagagagcc

SEQ ID NO: 24830 - DNA, 25 bp, Homo sapiens
ttgccccttgactgtaggagccaga

SEQ ID NO: 24831 - DNA, 25 bp, Homo sapiens
aaagccttttgtcctccaaagatga

SEQ ID NO: 24832 - DNA, 25 bp, Homo sapiens
aactgccttgtgttctgtgagaaac

SEQ ID NO: 24833 - DNA, 25 bp, Homo sapiens
aagaggccctttgaactgccttgtg

SEQ ID NO: 24834 - DNA, 25 bp, Homo sapiens
aatgcatcacaacttacaatgctgc

SEQ ID NO: 24835 - DNA, 25 bp, Homo sapiens
atgctgctcattgttgtgagtacta

SEQ ID NO: 24836 - DNA, 25 bp, Homo sapiens
ggaggaccacgaggaaataccctca

SEQ ID NO: 24837 - DNA, 25 bp, Homo sapiens
ggggacgagtgacggcaggaggacc

SEQ ID NO: 24838 - DNA, 25 bp, Homo sapiens
gttccaatccaaatgaatgcatcac

SEQ ID NO: 24839 - DNA, 25 bp, Homo sapiens
gttttcactgcttgtatgatgtttc

SEQ ID NO: 24840 - DNA, 25 bp, Homo sapiens
tcatacacctataaatctctaacaa

SEQ ID NO: 24841 - DNA, 25 bp, Homo sapiens
tgatgtttcccattcatacacctat

SEQ ID NO: 24842 - DNA, 25 bp, Homo sapiens
attcatcttgtgtcttattcaagta

SEQ ID NO: 24843 - DNA, 25 bp, Homo sapiens
cttttgctgctctcaccaacagcaa

SEQ ID NO: 24844 - DNA, 25 bp, Homo sapiens
gaattgaattcatcttgtgtcttat

SEQ ID NO: 24845 - DNA, 25 bp, Homo sapiens
gaggcatatgtggcttttgctgctc

SEQ ID NO: 24846 - DNA, 25 bp, Homo sapiens
gagtgacagtactcagtatatctga

SEQ ID NO: 24847 - DNA, 25 bp, Homo sapiens
ggagtgcttggaggcatatgtggct

SEQ ID NO: 24848 - DNA, 25 bp, Homo sapiens
gtaataaatggagtgcttggaggca

SEQ ID NO: 24849 - DNA, 25 bp, Homo sapiens
tatatctgagataaactctataatg

SEQ ID NO: 24850 - DNA, 25 bp, Homo sapiens
tccccacagtctacttttacaaacg

SEQ ID NO: 24851 - DNA, 25 bp, Homo sapiens
ttggctcttggtggaattgaattca

SEQ ID NO: 24852 - DNA, 25 bp, Homo sapiens
tttacagactgagtgacagtactca

SEQ ID NO: 24853 - DNA, 25 bp, Homo sapiens
atacttgaacttgtctcattccacc

SEQ ID NO: 24854 - DNA, 25 bp, Homo sapiens
atcagcatcctgatttgaaccctga

SEQ ID NO: 24855 - DNA, 25 bp, Homo sapiens
cagtggcggtgcaaactggtttcct

SEQ ID NO: 24856 - DNA, 25 bp, Homo sapiens
gcataagctgatcaccgtctagttg

SEQ ID NO: 24857 - DNA, 25 bp, Homo sapiens
ggaagcacaatttccaccttatttt

SEQ ID NO: 24858 - DNA, 25 bp, Homo sapiens
tctgtgtgcttatgtctcttgtgac

SEQ ID NO: 24859 - DNA, 25 bp, Homo sapiens
tcttgtgacaattgttttcctccct

SEQ ID NO: 24860 - DNA, 25 bp, Homo sapiens
tgtctctgttgcttcggggcataag

SEQ ID NO: 24861 - DNA, 25 bp, Homo sapiens
tgtgtagacaccctcttgggtccaa

SEQ ID NO: 24862 - DNA, 25 bp, Homo sapiens
ttggcagtttcaatgtctgtctctg

SEQ ID NO: 24863 - DNA, 25 bp, Homo sapiens
ttttgccatgggttcttcactgacc

SEQ ID NO: 24864 - DNA, 25 bp, Homo sapiens
aaagggctgcattctgtgatcacaa

SEQ ID NO: 24865 - DNA, 25 bp, Homo sapiens
acaaatgggtcttcagccttacccg

SEQ ID NO: 24866 - DNA, 25 bp, Homo sapiens
agtaccaagcctacaaggacctcaa

SEQ ID NO: 24867 - DNA, 25 bp, Homo sapiens
gaaactcagaacgtctgcagcctgg

SEQ ID NO: 24868 - DNA, 25 bp, Homo sapiens
gcagcctggtatagcccagcagtgg

SEQ ID NO: 24869 - DNA, 25 bp, Homo sapiens
gctgcatcactgtcctggaaatcac

SEQ ID NO: 24870 - DNA, 25 bp, Homo sapiens
taataaatccactctcaactgcagg

SEQ ID NO: 24871 - DNA, 25 bp, Homo sapiens
tactagacactactgacatccaagg

SEQ ID NO: 24872 - DNA, 25 bp, Homo sapiens
tcctgaaacttcaaggtccctgcca

SEQ ID NO: 24873 - DNA, 25 bp, Homo sapiens
tgacagaagcctgccttaaccagtc

SEQ ID NO: 24874 - DNA, 25 bp, Homo sapiens
tgcccttctgtccagggacttgatc

SEQ ID NO: 24875 - DNA, 25 bp, Homo sapiens
aaacccttactattccagcgcaagg

SEQ ID NO: 24876 - DNA, 25 bp, Homo sapiens
aacactgtgcattgtacttttctac

SEQ ID NO: 24877 - DNA, 25 bp, Homo sapiens
aagcagttctccagtgctgatgaag

SEQ ID NO: 24878 - DNA, 25 bp, Homo sapiens
caagatttctctacatttggccaaa

SEQ ID NO: 24879 - DNA, 25 bp, Homo sapiens
cagccctcaacgcaccaatagagaa

SEQ ID NO: 24880 - DNA, 25 bp, Homo sapiens
gacaccagactggtcttgggtctca

SEQ ID NO: 24881 - DNA, 25 bp, Homo sapiens
gactgacttcggtatcttcaggatg

SEQ ID NO: 24882 - DNA, 25 bp, Homo sapiens
gatcattgatccagcagacaccaga

SEQ ID NO: 24883 - DNA, 25 bp, Homo sapiens
gcagagcgtatagcccaagatttct

SEQ ID NO: 24884 - DNA, 25 bp, Homo sapiens
gcaggcagccaatgtgttggccacg

SEQ ID NO: 24885 - DNA, 25 bp, Homo sapiens
gggtctcagttttagtgcagccctc

SEQ ID NO: 24886 - DNA, 25 bp, Homo sapiens
aacaggactctgtgtctcattgcct

SEQ ID NO: 24887 - DNA, 25 bp, Homo sapiens
aagattcttaatttatgctccgtaa

SEQ ID NO: 24888 - DNA, 25 bp, Homo sapiens
aatccttaggtagcagtttctgttc

SEQ ID NO: 24889 - DNA, 25 bp, Homo sapiens
atatctgctggacacaattacggcc

SEQ ID NO: 24890 - DNA, 25 bp, Homo sapiens
attacggccattacatgatgcaggt

SEQ ID NO: 24891 - DNA, 25 bp, Homo sapiens
cctggtacatattaggccctcagca

SEQ ID NO: 24892 - DNA, 25 bp, Homo sapiens
cttgggcaatacggtctgtcctgaa

SEQ ID NO: 24893 - DNA, 25 bp, Homo sapiens
gactgtaattgatttttctctccct

SEQ ID NO: 24894 - DNA, 25 bp, Homo sapiens
gtggctaccgtgtcattatttcatg

SEQ ID NO: 24895 - DNA, 25 bp, Homo sapiens
tctcattgcctctagaatccttagg

SEQ ID NO: 24896 - DNA, 25 bp, Homo sapiens
tctgtaagtagcttgaggcctcctc

SEQ ID NO: 24897 - DNA, 25 bp, Homo sapiens
attgtatacaacatagccccaaata

SEQ ID NO: 24898 - DNA, 25 bp, Homo sapiens
caagacattctgcctacctattagc

SEQ ID NO: 24899 - DNA, 25 bp, Homo sapiens
gaaggtctggcaaagtcaggctcag

SEQ ID NO: 24900 - DNA, 25 bp, Homo sapiens
gagtcattctcatgcttttctttat

SEQ ID NO: 24901 - DNA, 25 bp, Homo sapiens
gctgcatagagctctccttgaaaac

SEQ ID NO: 24902 - DNA, 25 bp, Homo sapiens
ggaatggcttgctggggagcccatc

SEQ ID NO: 24903 - DNA, 25 bp, Homo sapiens
ggagcacatagagattcacccatgt

SEQ ID NO: 24904 - DNA, 25 bp, Homo sapiens
ggagctcacgcccagagactgggct

SEQ ID NO: 24905 - DNA, 25 bp, Homo sapiens
tcttttgtcctccttagcacaatgt

SEQ ID NO: 24906 - DNA, 25 bp, Homo sapiens
tgctgcagacctcggtgtggacaca

SEQ ID NO: 24907 - DNA, 25 bp, Homo sapiens
tggacacacgctgcatagagctctc

SEQ ID NO: 24908 - DNA, 25 bp, Homo sapiens
acttcactgatgcttgtctggtaat

SEQ ID NO: 24909 - DNA, 25 bp, Homo sapiens
agtagacttcttagtggtatccagc

SEQ ID NO: 24910 - DNA, 25 bp, Homo sapiens
attgcaatgttcagtcctagttttt

SEQ ID NO: 24911 - DNA, 25 bp, Homo sapiens
gagggctgctttatcatattgtact

SEQ ID NO: 24912 - DNA, 25 bp, Homo sapiens
gcatgggctgcattatctacagcat

SEQ ID NO: 24913 - DNA, 25 bp, Homo sapiens
ggtgtaggactctagtgttcttggg

SEQ ID NO: 24914 - DNA, 25 bp, Homo sapiens
gtggtaatgcctgttttcatctgta

SEQ ID NO: 24915 - DNA, 25 bp, Homo sapiens
gttcttgggtgtattgcatgggctg

SEQ ID NO: 24916 - DNA, 25 bp, Homo sapiens
tacacgaggcactacttctgattta

SEQ ID NO: 24917 - DNA, 25 bp, Homo sapiens
tatgtaccttagttctgagttagac

SEQ ID NO: 24918 - DNA, 25 bp, Homo sapiens
ttaatgtaactgtacccttctgcat

SEQ ID NO: 24919 - DNA, 25 bp, Homo sapiens
tgcctcctgtgtactgtgtcataaa

SEQ ID NO: 24920 - DNA, 25 bp, Homo sapiens
aaagtcacccaaacacttctgcttt

SEQ ID NO: 24921 - DNA, 25 bp, Homo sapiens
aaatgagggctgcacattgcctgtt

SEQ ID NO: 24922 - DNA, 25 bp, Homo sapiens
agccctttgctctggaggaagttct

SEQ ID NO: 24923 - DNA, 25 bp, Homo sapiens
attgcctgttctgcttcgaagtatt

SEQ ID NO: 24924 - DNA, 25 bp, Homo sapiens
caagcatcaccctgggagtttcctg

SEQ ID NO: 24925 - DNA, 25 bp, Homo sapiens
gaaatatctttctcttacctgttat

SEQ ID NO: 24926 - DNA, 25 bp, Homo sapiens
gggagtttcctgagggttttctcat

SEQ ID NO: 24927 - DNA, 25 bp, Homo sapiens
gtctggcccgcaatactgtaggaac

SEQ ID NO: 24928 - DNA, 25 bp, Homo sapiens
tatccacagtactcactttttccaa

SEQ ID NO: 24929 - DNA, 25 bp, Homo sapiens
tatgtgccaaagctttactactgtg

SEQ ID NO: 24930 - DNA, 25 bp, Homo sapiens
tgctttcacttaagtgtctggcccg

SEQ ID NO: 24931 - DNA, 25 bp, Homo sapiens
aaattggtcactttcctattacacg

SEQ ID NO: 24932 - DNA, 25 bp, Homo sapiens
cagagcctcctagatgtaacattcc

SEQ ID NO: 24933 - DNA, 25 bp, Homo sapiens
gaggtccatatttagtggtactctg

SEQ ID NO: 24934 - DNA, 25 bp, Homo sapiens
gattctactcttatatgctggactg

SEQ ID NO: 24935 - DNA, 25 bp, Homo sapiens
gctggactgcattcacacatggcat

SEQ ID NO: 24936 - DNA, 25 bp, Homo sapiens
gcttggggagctttaagcctcagtt

SEQ ID NO: 24937 - DNA, 25 bp, Homo sapiens
ggaccgataagtgtgcttaatcctg

SEQ ID NO: 24938 - DNA, 25 bp, Homo sapiens
gtagcaaattaactttacatccttt

SEQ ID NO: 24939 - DNA, 25 bp, Homo sapiens
gtgccatagtgcaggcttggggagc

SEQ ID NO: 24940 - DNA, 25 bp, Homo sapiens
gtgtttgtgccatatttgtgccatt

SEQ ID NO: 24941 - DNA, 25 bp, Homo sapiens
tacatcctttttcctacttgttatg

SEQ ID NO: 24942 - DNA, 25 bp, Homo sapiens
aaagaagaggtgcttctgatctgtc

SEQ ID NO: 24943 - DNA, 25 bp, Homo sapiens
aaccatccatcaacttctataaaag

SEQ ID NO: 24944 - DNA, 25 bp, Homo sapiens
agaatgagcacccattccaaagctt

SEQ ID NO: 24945 - DNA, 25 bp, Homo sapiens
agtggcgttgttgcatgtttgaaat

SEQ ID NO: 24946 - DNA, 25 bp, Homo sapiens
attaccagtggcgttgttgcatgtt

SEQ ID NO: 24947 - DNA, 25 bp, Homo sapiens
ccattccaaagctttattaccagtg

SEQ ID NO: 24948 - DNA, 25 bp, Homo sapiens
ctgatctgtccagtgaagagggttg

SEQ ID NO: 24949 - DNA, 25 bp, Homo sapiens
cttctcttgctttctatgctgtttg

SEQ ID NO: 24950 - DNA, 25 bp, Homo sapiens
gaataaattcccaacttctcttgct

SEQ ID NO: 24951 - DNA, 25 bp, Homo sapiens
ggaatgaaccatccatcaacttcta

SEQ ID NO: 24952 - DNA, 25 bp, Homo sapiens
tgctttctatgctgtttgtagtgaa

SEQ ID NO: 24953 - DNA, 25 bp, Homo sapiens
aagcctcaggcttcaatgcttctgg

SEQ ID NO: 24954 - DNA, 25 bp, Homo sapiens
acttcactccaaggtacatttgctt

SEQ ID NO: 24955 - DNA, 25 bp, Homo sapiens
agtctgtatctttgctgtatgccaa

SEQ ID NO: 24956 - DNA, 25 bp, Homo sapiens
cacctgtaagtctttgtcttcacct

SEQ ID NO: 24957 - DNA, 25 bp, Homo sapiens
gaggacctgaggaatgcctgggaga

SEQ ID NO: 24958 - DNA, 25 bp, Homo sapiens
gcttctggggttgggcatgaggatg

SEQ ID NO: 24959 - DNA, 25 bp, Homo sapiens
gcttgtgtgacggaaggtccttcag

SEQ ID NO: 24960 - DNA, 25 bp, Homo sapiens
ggcaggaggaggttctcagaatcca

SEQ ID NO: 24961 - DNA, 25 bp, Homo sapiens
taaaaatcttctgtacttcactcca

SEQ ID NO: 24962 - DNA, 25 bp, Homo sapiens
tggaagagctgtgtagccctttcta

SEQ ID NO: 24963 - DNA, 25 bp, Homo sapiens
tgtcttcacctattatcatctggag

SEQ ID NO: 24964 - DNA, 25 bp, Homo sapiens
aaaacagctatctcacaaagttgtg

SEQ ID NO: 24965 - DNA, 25 bp, Homo sapiens
attaatattgttgccgctgttgtgt

SEQ ID NO: 24966 - DNA, 25 bp, Homo sapiens
cccagccctacagacttgctgtgtg

SEQ ID NO: 24967 - DNA, 25 bp, Homo sapiens
ccctgctaatgactgccagactgtg

SEQ ID NO: 24968 - DNA, 25 bp, Homo sapiens
cctcagttttcccagctatgaaaac

SEQ ID NO: 24969 - DNA, 25 bp, Homo sapiens
taatgactgccagactgtggggagg

SEQ ID NO: 24970 - DNA, 25 bp, Homo sapiens
tattgttgccgctgttgtgttgttg

SEQ ID NO: 24971 - DNA, 25 bp, Homo sapiens
tcaccctgctaatgactgccagact

SEQ ID NO: 24972 - DNA, 25 bp, Homo sapiens
tcctctggacctaaacctgaaatcc

SEQ ID NO: 24973 - DNA, 25 bp, Homo sapiens
tctcctctggacctaaacctgaaat

SEQ ID NO: 24974 - DNA, 25 bp, Homo sapiens
tgtccagtaccgcagtggggctgct

SEQ ID NO: 24975 - DNA, 25 bp, Homo sapiens
aaccataactgatttaatgagccat

SEQ ID NO: 24976 - DNA, 25 bp, Homo sapiens
aatctttgagacaagcatatgctac

SEQ ID NO: 24977 - DNA, 25 bp, Homo sapiens
aatgagccattcgcagtttcactgt

SEQ ID NO: 24978 - DNA, 25 bp, Homo sapiens
caagtaggagaggagcgagcgacca

SEQ ID NO: 24979 - DNA, 25 bp, Homo sapiens
ccattcgcagtttcactgtaccggc

SEQ ID NO: 24980 - DNA, 25 bp, Homo sapiens
cggccgtgcgtacttagacatgcat

SEQ ID NO: 24981 - DNA, 25 bp, Homo sapiens
gacatgcatggcttaatctttgaga

SEQ ID NO: 24982 - DNA, 25 bp, Homo sapiens
gagcgaccaaaggaaccataactga

SEQ ID NO: 24983 - DNA, 25 bp, Homo sapiens
gcatatgctactggcaggatcaacc

SEQ ID NO: 24984 - DNA, 25 bp, Homo sapiens
ggagcgagcgaccaaaggaaccata

SEQ ID NO: 24985 - DNA, 25 bp, Homo sapiens
gtgcgtacttagacatgcatggctt

SEQ ID NO: 24986 - DNA, 25 bp, Homo sapiens
aatatccacagtactcactttttcc

SEQ ID NO: 24987 - DNA, 25 bp, Homo sapiens
gaaagcatatgcagccaaccaagat

SEQ ID NO: 24988 - DNA, 25 bp, Homo sapiens
gtactcactttttccaaatgatcct

SEQ ID NO: 24989 - DNA, 25 bp, Homo sapiens
accacccagacctggatgtccagta

SEQ ID NO: 24990 - DNA, 25 bp, Homo sapiens
agaggctgtgcaaccgcctcaatgt

SEQ ID NO: 24991 - DNA, 25 bp, Homo sapiens
atgaaccacattgatgtctcctgct

SEQ ID NO: 24992 - DNA, 25 bp, Homo sapiens
attgatgtctcctgctgtactaaaa

SEQ ID NO: 24993 - DNA, 25 bp, Homo sapiens
gcactcacgaaccgaaaaaccaaag

SEQ ID NO: 24994 - DNA, 25 bp, Homo sapiens
gctatatggtaagaggctgtgcaac

SEQ ID NO: 24995 - DNA, 25 bp, Homo sapiens
gtaaccacccagacctggatgtcca

SEQ ID NO: 24996 - DNA, 25 bp, Homo sapiens
gtctcctgctgtactaaaagtggct

SEQ ID NO: 24997 - DNA, 25 bp, Homo sapiens
tactaaaagtggctgtaaccaccca

SEQ ID NO: 24998 - DNA, 25 bp, Homo sapiens
tcacgaaccgaaaaaccaaagctat

SEQ ID NO: 24999 - DNA, 25 bp, Homo sapiens
tcagcatgaaccacattgatgtctc

SEQ ID NO: 25000 - DNA, 25 bp, Homo sapiens
aaaggaggatcctcgcagcttctac

SEQ ID NO: 25001 - DNA, 25 bp, Homo sapiens
agagtaaacttttctagctgcccct

SEQ ID NO: 25002 - DNA, 25 bp, Homo sapiens
atggaatctgacggttgggagtggt

SEQ ID NO: 25003 - DNA, 25 bp, Homo sapiens
ccaggccaacagctggtccctggag

SEQ ID NO: 25004 - DNA, 25 bp, Homo sapiens
cgcagcttctacgagcggggtgtcg

SEQ ID NO: 25005 - DNA, 25 bp, Homo sapiens
ctcatcttcaccgtggacttcgaaa

SEQ ID NO: 25006 - DNA, 25 bp, Homo sapiens
gaaggccagtgtggtaaccttacct

SEQ ID NO: 25007 - DNA, 25 bp, Homo sapiens
gcagctgcgctgggtcaagcagaca

SEQ ID NO: 25008 - DNA, 25 bp, Homo sapiens
tacgagcggggtgtcgcagtcttgt

SEQ ID NO: 25009 - DNA, 25 bp, Homo sapiens
tgcagcttcggagtcacgggtttga

SEQ ID NO: 25010 - DNA, 25 bp, Homo sapiens
tggtaaccttacctgtctacctgaa

SEQ ID NO: 25011 - DNA, 25 bp, Homo sapiens
aaactgattagcccattccagaaga

SEQ ID NO: 25012 - DNA, 25 bp, Homo sapiens
aatagtccccatagttagagtagtt

SEQ ID NO: 25013 - DNA, 25 bp, Homo sapiens
caaggctcaggatcccatagaccag

SEQ ID NO: 25014 - DNA, 25 bp, Homo sapiens
cagaacatccaaacctcaaggctca

SEQ ID NO: 25015 - DNA, 25 bp, Homo sapiens
cattatctatactgctttttgttat

SEQ ID NO: 25016 - DNA, 25 bp, Homo sapiens
gagcccacctttttgataaacttag

SEQ ID NO: 25017 - DNA, 25 bp, Homo sapiens
gagttgtgttaagctgagtgtagtg

SEQ ID NO: 25018 - DNA, 25 bp, Homo sapiens
gggtatgttctggtaaatccatcct

SEQ ID NO: 25019 - DNA, 25 bp, Homo sapiens
ggtaaatccatccttattgtataga

SEQ ID NO: 25020 - DNA, 25 bp, Homo sapiens
gtgacacataagcttcccaaaaact

SEQ ID NO: 25021 - DNA, 25 bp, Homo sapiens
tgaacacagcacatatacattatct

SEQ ID NO: 25022 - DNA, 25 bp, Homo sapiens
aaatcggggttccatcacaagctat

SEQ ID NO: 25023 - DNA, 25 bp, Homo sapiens
aagagccgcttccggatggctcttc

SEQ ID NO: 25024 - DNA, 25 bp, Homo sapiens
acacgtcagcatctaatcccaagac

SEQ ID NO: 25025 - DNA, 25 bp, Homo sapiens
acttgcacacatactgcctagttgt

SEQ ID NO: 25026 - DNA, 25 bp, Homo sapiens
agcagctgtatagcctgtgactctc

SEQ ID NO: 25027 - DNA, 25 bp, Homo sapiens
ctccttccacacctgattagaacat

SEQ ID NO: 25028 - DNA, 25 bp, Homo sapiens
gagagcgttcacagggacactgtct

SEQ ID NO: 25029 - DNA, 25 bp, Homo sapiens
gatacctgccgagggccaagggtgt

SEQ ID NO: 25030 - DNA, 25 bp, Homo sapiens
ggagctcaagtgtcgggaactgtct

SEQ ID NO: 25031 - DNA, 25 bp, Homo sapiens
tgggctctctgtaacatttcaccac

SEQ ID NO: 25032 - DNA, 25 bp, Homo sapiens
ttgctttcagctgtcacttgcacac

SEQ ID NO: 25033 - DNA, 25 bp, Homo sapiens
aatggcacaattcttcggatgactg

SEQ ID NO: 25034 - DNA, 25 bp, Homo sapiens
cacagccttctgtggtgtcatttct

SEQ ID NO: 25035 - DNA, 25 bp, Homo sapiens
ccaacgcatgctcctggagctcaca

SEQ ID NO: 25036 - DNA, 25 bp, Homo sapiens
ccctcctcttcaggaatcttcctga

SEQ ID NO: 25037 - DNA, 25 bp, Homo sapiens
ctatgtagagaacacgcttcacccc

SEQ ID NO: 25038 - DNA, 25 bp, Homo sapiens
gcgtggatccctcaaccaagaagaa

SEQ ID NO: 25039 - DNA, 25 bp, Homo sapiens
ggcccagtcgaaggcccaggatggc

SEQ ID NO: 25040 - DNA, 25 bp, Homo sapiens
tacagtgcgcacaggctttatcgag

SEQ ID NO: 25041 - DNA, 25 bp, Homo sapiens
tccacattcagaggcatcacaagta

SEQ ID NO: 25042 - DNA, 25 bp, Homo sapiens
tcttcctgaagacatggcccagtcg

SEQ ID NO: 25043 - DNA, 25 bp, Homo sapiens
tgtcttcaagtgacctgtactgctt

SEQ ID NO: 25044 - DNA, 25 bp, Homo sapiens
acattgctgtgctttggggattccc

SEQ ID NO: 25045 - DNA, 25 bp, Homo sapiens
caccggctctgaccaggagtttggg

SEQ ID NO: 25046 - DNA, 25 bp, Homo sapiens
cattgaaaccactagttctgtcccc

SEQ ID NO: 25047 - DNA, 25 bp, Homo sapiens
ctatgtcctcacaccattgaaacca

SEQ ID NO: 25048 - DNA, 25 bp, Homo sapiens
ggaagaagcagcccatgacagctcc

SEQ ID NO: 25049 - DNA, 25 bp, Homo sapiens
ggagacctggttgtgtgtgtgtgag

SEQ ID NO: 25050 - DNA, 25 bp, Homo sapiens
ggatccacgtgcccattgtggaggc

SEQ ID NO: 25051 - DNA, 25 bp, Homo sapiens
tcacctgcttctgagttgcccagga

SEQ ID NO: 25052 - DNA, 25 bp, Homo sapiens
tcccttcccgaggcacagagagaca

SEQ ID NO: 25053 - DNA, 25 bp, Homo sapiens
tctaccccaggtcagacggacagaa

SEQ ID NO: 25054 - DNA, 25 bp, Homo sapiens
tgtgtgtgagtggttgaccttcctc

SEQ ID NO: 25055 - DNA, 25 bp, Homo sapiens
aacccactggtgcaagtcctagatt

SEQ ID NO: 25056 - DNA, 25 bp, Homo sapiens
agccagtagtggctcagcctgagtt

SEQ ID NO: 25057 - DNA, 25 bp, Homo sapiens
ataatgctatggccagaactgaaac

SEQ ID NO: 25058 - DNA, 25 bp, Homo sapiens
gaagaacctggagtctgatgtccaa

SEQ ID NO: 25059 - DNA, 25 bp, Homo sapiens
gatgctggtgttggtgtgacataat

SEQ ID NO: 25060 - DNA, 25 bp, Homo sapiens
gccgtctgcaagctgggttagagag

SEQ ID NO: 25061 - DNA, 25 bp, Homo sapiens
gctttccattacatgagctgtctca

SEQ ID NO: 25062 - DNA, 25 bp, Homo sapiens
ggcgaagtcgcacaataggccgtct

SEQ ID NO: 25063 - DNA, 25 bp, Homo sapiens
ggctcccacagttagaaggcgaagt

SEQ ID NO: 25064 - DNA, 25 bp, Homo sapiens
taccaaagaggctaccgattccttc

SEQ ID NO: 25065 - DNA, 25 bp, Homo sapiens
tctgcaccttctaaacctagttctt

SEQ ID NO: 25066 - DNA, 25 bp, Homo sapiens
aagcatcaccctgggagtttcctga

SEQ ID NO: 25067 - DNA, 25 bp, Homo sapiens
agcatgatcttgttactgtgatatt

SEQ ID NO: 25068 - DNA, 25 bp, Homo sapiens
ccaaacacttctgctttcacttaag

SEQ ID NO: 25069 - DNA, 25 bp, Homo sapiens
ctgttctgcttcgaagtattcaata

SEQ ID NO: 25070 - DNA, 25 bp, Homo sapiens
cttctccaagcatcaccctgggagt

SEQ ID NO: 25071 - DNA, 25 bp, Homo sapiens
ggagtttcctgagggttttctcata

SEQ ID NO: 25072 - DNA, 25 bp, Homo sapiens
ttccaaatgatcctagtaattgcct

SEQ ID NO: 25073 - DNA, 25 bp, Homo sapiens
aaagatgttcctacgggcttgttgc

SEQ ID NO: 25074 - DNA, 25 bp, Homo sapiens
aacatggctgaacgcgtgtgtacac

SEQ ID NO: 25075 - DNA, 25 bp, Homo sapiens
caaaccaaccgcacatgcagatggg

SEQ ID NO: 25076 - DNA, 25 bp, Homo sapiens
cgccggcaaaactttggcactgggg

SEQ ID NO: 25077 - DNA, 25 bp, Homo sapiens
gaagaaacgtctatgtgtacagatg

SEQ ID NO: 25078 - DNA, 25 bp, Homo sapiens
gatgcaatcggtttaaacatggctg

SEQ ID NO: 25079 - DNA, 25 bp, Homo sapiens
gcgggccggtttcgaagttgatgca

SEQ ID NO: 25080 - DNA, 25 bp, Homo sapiens
gggccctgagtaatcgcttaaagat

SEQ ID NO: 25081 - DNA, 25 bp, Homo sapiens
gggcttgttgctgttgatgttttgt

SEQ ID NO: 25082 - DNA, 25 bp, Homo sapiens
gtgtgtacacgggactgacgcaacc

SEQ ID NO: 25083 - DNA, 25 bp, Homo sapiens
tgacgcaacccacgtgtaactgtca

SEQ ID NO: 25084 - DNA, 25 bp, Homo sapiens
actgcactttgaagaggtcgccact

SEQ ID NO: 25085 - DNA, 25 bp, Homo sapiens
agaggtcgccactgggttatttagt

SEQ ID NO: 25086 - DNA, 25 bp, Homo sapiens
agtgcaactcagtctaggacagcca

SEQ ID NO: 25087 - DNA, 25 bp, Homo sapiens
ggaccatctcttttacaagtgcaac

SEQ ID NO: 25088 - DNA, 25 bp, Homo sapiens
ggatgcagtgtctggagttggaccc

SEQ ID NO: 25089 - DNA, 25 bp, Homo sapiens
ggtgaccaaggacactgcactttga

SEQ ID NO: 25090 - DNA, 25 bp, Homo sapiens
ggttatttagtgtcttcactgcttt

SEQ ID NO: 25091 - DNA, 25 bp, Homo sapiens
gtaggtgtgggaccatctcttttac

SEQ ID NO: 25092 - DNA, 25 bp, Homo sapiens
gtctaggacagccatggatgcagtg

SEQ ID NO: 25093 - DNA, 25 bp, Homo sapiens
gtggcattaggtatttggctgttta

SEQ ID NO: 25094 - DNA, 25 bp, Homo sapiens
tgccccagtagcatctgcattggtg

SEQ ID NO: 25095 - DNA, 25 bp, Homo sapiens
aattggccttatggtgagacttatt

SEQ ID NO: 25096 - DNA, 25 bp, Homo sapiens
agacttattgcattgcactgcccgt

SEQ ID NO: 25097 - DNA, 25 bp, Homo sapiens
gaaggagcaggtggcggaggtgcgc

SEQ ID NO: 25098 - DNA, 25 bp, Homo sapiens
gatggaggagatgggcagccggacc

SEQ ID NO: 25099 - DNA, 25 bp, Homo sapiens
gattcaccaagtttcacgcaaagct

SEQ ID NO: 25100 - DNA, 25 bp, Homo sapiens
gcaggcccagcagatacgcctgcag

SEQ ID NO: 25101 - DNA, 25 bp, Homo sapiens
gcgcgccaagctggaggagcaggcc

SEQ ID NO: 25102 - DNA, 25 bp, Homo sapiens
ggggtcccattgccaaattggcctt

SEQ ID NO: 25103 - DNA, 25 bp, Homo sapiens
tcgagcccctggtggaagacatgca

SEQ ID NO: 25104 - DNA, 25 bp, Homo sapiens
tgggccgggctggtggagaaggtgc

SEQ ID NO: 25105 - DNA, 25 bp, Homo sapiens
cacgtcctggaactgcatgttcttg

SEQ ID NO: 25106 - DNA, 25 bp, Homo sapiens
cctttgtcactgcctatagacttgt

SEQ ID NO: 25107 - DNA, 25 bp, Homo sapiens
cgactcttgggacttcatcttaact

SEQ ID NO: 25108 - DNA, 25 bp, Homo sapiens
ctgcctatagacttgtagctgctgt

SEQ ID NO: 25109 - DNA, 25 bp, Homo sapiens
cttgggacttcatcttaacttctcg

SEQ ID NO: 25110 - DNA, 25 bp, Homo sapiens
gaatcacgtcctggaactgcatgtt

SEQ ID NO: 25111 - DNA, 25 bp, Homo sapiens
gcttgcccttgcttaagaactcaaa

SEQ ID NO: 25112 - DNA, 25 bp, Homo sapiens
ggtaagcttgcccttgcttaagaac

SEQ ID NO: 25113 - DNA, 25 bp, Homo sapiens
tccctgcagagaatcacgtcctgga

SEQ ID NO: 25114 - DNA, 25 bp, Homo sapiens
tctctctttgtccctgcagagaatc

SEQ ID NO: 25115 - DNA, 25 bp, Homo sapiens
tgggatctcagatcctttgtcactg

SEQ ID NO: 25116 - DNA, 25 bp, Homo sapiens
acacggcctgagcgtccagaaatgg

SEQ ID NO: 25117 - DNA, 25 bp, Homo sapiens
agatgacaccggttttcctagaagc

SEQ ID NO: 25118 - DNA, 25 bp, Homo sapiens
cgcagatgacaccggttttcctaga

SEQ ID NO: 25119 - DNA, 25 bp, Homo sapiens
gtctttccattaaagaaacaccgtg

SEQ ID NO: 25120 - DNA, 25 bp, Homo sapiens
ttctggtccagcgcaaggaggggct

SEQ ID NO: 25121 - DNA, 25 bp, Homo sapiens
actcaatttagtggcagggtggttt

SEQ ID NO: 25122 - DNA, 25 bp, Homo sapiens
ataaatgcagtgtgacttttcccac

SEQ ID NO: 25123 - DNA, 25 bp, Homo sapiens
atgcagtgtgacttttcccacacag

SEQ ID NO: 25124 - DNA, 25 bp, Homo sapiens
attttcttctgtttctgatttttgt

SEQ ID NO: 25125 - DNA, 25 bp, Homo sapiens
catagggatactgcattctggaaat

SEQ ID NO: 25126 - DNA, 25 bp, Homo sapiens
ggattgtgaggctcttaacttctta

SEQ ID NO: 25127 - DNA, 25 bp, Homo sapiens
gtgaggctcttaacttcttaaaagt

SEQ ID NO: 25128 - DNA, 25 bp, Homo sapiens
tcctataagcagtctttatgtctct

SEQ ID NO: 25129 - DNA, 25 bp, Homo sapiens
tgacctgctgtagaacatagggata

SEQ ID NO: 25130 - DNA, 25 bp, Homo sapiens
tgtgaaatacccaccactaaagttt

SEQ ID NO: 25131 - DNA, 25 bp, Homo sapiens
tttacttaacttaccataaatgcag

SEQ ID NO: 25132 - DNA, 25 bp, Homo sapiens
agttcataacagtgccattgtcttt

SEQ ID NO: 25133 - DNA, 25 bp, Homo sapiens
cagaatgtcagattcctttcccttt

SEQ ID NO: 25134 - DNA, 25 bp, Homo sapiens
ctcctcctgaaaaccaagctttgat

SEQ ID NO: 25135 - DNA, 25 bp, Homo sapiens
gactgtacacactttatttacttcg

SEQ ID NO: 25136 - DNA, 25 bp, Homo sapiens
gatttgcccatttacacttttgaga

SEQ ID NO: 25137 - DNA, 25 bp, Homo sapiens
gtgttttcagagcattagctgtcag

SEQ ID NO: 25138 - DNA, 25 bp, Homo sapiens
tagactagagaaaccgtcctctttt

SEQ ID NO: 25139 - DNA, 25 bp, Homo sapiens
tagctgtcagtgtattttccagttt

SEQ ID NO: 25140 - DNA, 25 bp, Homo sapiens
tcctctttttccatcataattctaa

SEQ ID NO: 25141 - DNA, 25 bp, Homo sapiens
tgcagattttacatacaacttttat

SEQ ID NO: 25142 - DNA, 25 bp, Homo sapiens
ttccagttttgggtattgcagattt

SEQ ID NO: 25143 - DNA, 25 bp, Homo sapiens
agctggttgccatgtaaaagtacta

SEQ ID NO: 25144 - DNA, 25 bp, Homo sapiens
aggaagcccaagctactcatgtata

SEQ ID NO: 25145 - DNA, 25 bp, Homo sapiens
cccaagctactcatgtataaatgcc

SEQ ID NO: 25146 - DNA, 25 bp, Homo sapiens
cccagatgtttcagccatctcagcc

SEQ ID NO: 25147 - DNA, 25 bp, Homo sapiens
cgctcactctggggaagctggttgc

SEQ ID NO: 25148 - DNA, 25 bp, Homo sapiens
ctggggaagctggttgccatgtaaa

SEQ ID NO: 25149 - DNA, 25 bp, Homo sapiens
gaaacaggaaacttggctatattag

SEQ ID NO: 25150 - DNA, 25 bp, Homo sapiens
gaacgctcactctggggaagctggt

SEQ ID NO: 25151 - DNA, 25 bp, Homo sapiens
gaagcccaagctactcatgtataaa

SEQ ID NO: 25152 - DNA, 25 bp, Homo sapiens
gcccaggcaccagacaagtgggtga

SEQ ID NO: 25153 - DNA, 25 bp, Homo sapiens
taaaagtactactgccctgagacca

SEQ ID NO: 25154 - DNA, 25 bp, Homo sapiens
aaagcaacccaacatcagtatcctg

SEQ ID NO: 25155 - DNA, 25 bp, Homo sapiens
aaggttacccacattgagctcatac

SEQ ID NO: 25156 - DNA, 25 bp, Homo sapiens
aatgtcatcgttatttatcctgatt

SEQ ID NO: 25157 - DNA, 25 bp, Homo sapiens
accccacacaaatgcactcaaagca

SEQ ID NO: 25158 - DNA, 25 bp, Homo sapiens
agatcagtctgtttatgtttgctta

SEQ ID NO: 25159 - DNA, 25 bp, Homo sapiens
agcattgtccaagccctaagtatgg

SEQ ID NO: 25160 - DNA, 25 bp, Homo sapiens
gaaacttccatggcattatctttta

SEQ ID NO: 25161 - DNA, 25 bp, Homo sapiens
gagctcataccagtgtgaaacttcc

SEQ ID NO: 25162 - DNA, 25 bp, Homo sapiens
gtatggttggcctaagctttgctga

SEQ ID NO: 25163 - DNA, 25 bp, Homo sapiens
tgcagtttctatgggccctttctgc

SEQ ID NO: 25164 - DNA, 25 bp, Homo sapiens
ttctgcagcctttactcatggaaga

SEQ ID NO: 25165 - DNA, 25 bp, Homo sapiens
aaacgcctgtaaagactggcatctt

SEQ ID NO: 25166 - DNA, 25 bp, Homo sapiens
aaagaaccaacccaggacagagcca

SEQ ID NO: 25167 - DNA, 25 bp, Homo sapiens
acagagccacaatcttcctctattt

SEQ ID NO: 25168 - DNA, 25 bp, Homo sapiens
acccaggacagagccacaatcttcc

SEQ ID NO: 25169 - DNA, 25 bp, Homo sapiens
atcttcacaggatgtcagtgtttaa

SEQ ID NO: 25170 - DNA, 25 bp, Homo sapiens
caggacagagccacaatcttcctct

SEQ ID NO: 25171 - DNA, 25 bp, Homo sapiens
gactggcatcttcacaggatgtcag

SEQ ID NO: 25172 - DNA, 25 bp, Homo sapiens
gcctgtaaagactggcatcttcaca

SEQ ID NO: 25173 - DNA, 25 bp, Homo sapiens
tatgactgctaaaagaaccaaccca

SEQ ID NO: 25174 - DNA, 25 bp, Homo sapiens
tttcacttgtattcatttgtaaaac

SEQ ID NO: 25175 - DNA, 25 bp, Homo sapiens
tttgtattagtgtaacatactcccc

SEQ ID NO: 25176 - DNA, 25 bp, Homo sapiens
agcagttcgggttgtccaattctgt

SEQ ID NO: 25177 - DNA, 25 bp, Homo sapiens
cagaatgcagcggagctaggacccc

SEQ ID NO: 25178 - DNA, 25 bp, Homo sapiens
caggtggtggctgagacagctggcg

SEQ ID NO: 25179 - DNA, 25 bp, Homo sapiens
ccatcctctgcgtttcatttgcagt

SEQ ID NO: 25180 - DNA, 25 bp, Homo sapiens
cctccccagcactggtatctgagta

SEQ ID NO: 25181 - DNA, 25 bp, Homo sapiens
ctccttcctctggttttgaaaagca

SEQ ID NO: 25182 - DNA, 25 bp, Homo sapiens
gcagccatcagttgctcttgctgac

SEQ ID NO: 25183 - DNA, 25 bp, Homo sapiens
ggacctcggctgcagtaaagttacg

SEQ ID NO: 25184 - DNA, 25 bp, Homo sapiens
taaagttacgtgaggcctgtctctc

SEQ ID NO: 25185 - DNA, 25 bp, Homo sapiens
tgagtaacggctaagaacctccttc

SEQ ID NO: 25186 - DNA, 25 bp, Homo sapiens
tgtctctcggggcctggaagtggca

SEQ ID NO: 25187 - DNA, 25 bp, Homo sapiens
aatcttttgaagttggcgccggaca

SEQ ID NO: 25188 - DNA, 25 bp, Homo sapiens
aatgagtttgcccgtgctcatacgt

SEQ ID NO: 25189 - DNA, 25 bp, Homo sapiens
agagtctctctcgtatgggatctga

SEQ ID NO: 25190 - DNA, 25 bp, Homo sapiens
agctctctcaaaagtgcttggcaga

SEQ ID NO: 25191 - DNA, 25 bp, Homo sapiens
atgagaattacagccttcctacctg

SEQ ID NO: 25192 - DNA, 25 bp, Homo sapiens
cctcccctcagaatccaatgagcca

SEQ ID NO: 25193 - DNA, 25 bp, Homo sapiens
gaaacttccagttggtgcttgcgtg

SEQ ID NO: 25194 - DNA, 25 bp, Homo sapiens
gaaggcagtggcggccacttctaca

SEQ ID NO: 25195 - DNA, 25 bp, Homo sapiens
ggtctccaattgctatgtttctcac

SEQ ID NO: 25196 - DNA, 25 bp, Homo sapiens
tcatacgtcttcaacccagttgcaa

SEQ ID NO: 25197 - DNA, 25 bp, Homo sapiens
tcatccgcttgatccagtggcatat

SEQ ID NO: 25198 - DNA, 25 bp, Homo sapiens
tggaggaagttctccagcttcagct

SEQ ID NO: 25199 - DNA, 25 bp, Homo sapiens
aactgttagcaagcggcatttggat

SEQ ID NO: 25200 - DNA, 25 bp, Homo sapiens
agacctggcacttcagtaactcagc

SEQ ID NO: 25201 - DNA, 25 bp, Homo sapiens
aggacattaggattggtgctcagaa

SEQ ID NO: 25202 - DNA, 25 bp, Homo sapiens
atttcctgccagggcttatattagg

SEQ ID NO: 25203 - DNA, 25 bp, Homo sapiens
ctattaccattctaactttcataaa

SEQ ID NO: 25204 - DNA, 25 bp, Homo sapiens
gaaatggttaatcatgctgtgtgct

SEQ ID NO: 25205 - DNA, 25 bp, Homo sapiens
gcttcaagagttccacttggctctc

SEQ ID NO: 25206 - DNA, 25 bp, Homo sapiens
gcttccacttcactcaacttaagag

SEQ ID NO: 25207 - DNA, 25 bp, Homo sapiens
ggcatgattgtgcttgcaggccaag

SEQ ID NO: 25208 - DNA, 25 bp, Homo sapiens
tggctctcccaaataggtacctcaa

SEQ ID NO: 25209 - DNA, 25 bp, Homo sapiens
ttggatgtcttgacaggggctttgc

SEQ ID NO: 25210 - DNA, 25 bp, Homo sapiens
aactgggtcccaatgatcaatacaa

SEQ ID NO: 25211 - DNA, 25 bp, Homo sapiens
ataacgctgctttagaatgaaggtc

SEQ ID NO: 25212 - DNA, 25 bp, Homo sapiens
caaacatgctccgccagatcatcgg

SEQ ID NO: 25213 - DNA, 25 bp, Homo sapiens
cagagccctggaacaaactgggtcc

SEQ ID NO: 25214 - DNA, 25 bp, Homo sapiens
ccgcacaattttccacttaaccagg

SEQ ID NO: 25215 - DNA, 25 bp, Homo sapiens
cttagggcctggtggctaggtcggt

SEQ ID NO: 25216 - DNA, 25 bp, Homo sapiens
cttgcgtctggcattgttcaatcca

SEQ ID NO: 25217 - DNA, 25 bp, Homo sapiens
gaagaaggaacgtccagatttctaa

SEQ ID NO: 25218 - DNA, 25 bp, Homo sapiens
gatctctattgtaatctctattgga

SEQ ID NO: 25219 - DNA, 25 bp, Homo sapiens
gcagataatttttagcttagggcct

SEQ ID NO: 25220 - DNA, 25 bp, Homo sapiens
tccgccagatcatcggtcaggccaa

SEQ ID NO: 25221 - DNA, 25 bp, Homo sapiens
aacttgcgattcttcttagttttct

SEQ ID NO: 25222 - DNA, 25 bp, Homo sapiens
aatccgtagtaattcctaatcttgg

SEQ ID NO: 25223 - DNA, 25 bp, Homo sapiens
actttcattgttgtgccagctggtt

SEQ ID NO: 25224 - DNA, 25 bp, Homo sapiens
aggagcgatgatgtactgtaatttt

SEQ ID NO: 25225 - DNA, 25 bp, Homo sapiens
attcattatttctcgagtactttca

SEQ ID NO: 25226 - DNA, 25 bp, Homo sapiens
atttctattgtcttcacttggatca

SEQ ID NO: 25227 - DNA, 25 bp, Homo sapiens
ccccgcaccagatcaagtagtttgg

SEQ ID NO: 25228 - DNA, 25 bp, Homo sapiens
gaagtgggacgagcacatttctatt

SEQ ID NO: 25229 - DNA, 25 bp, Homo sapiens
gatcgtcttgtatggtgaattttct

SEQ ID NO: 25230 - DNA, 25 bp, Homo sapiens
gttttctgcatacttttcatcacga

SEQ ID NO: 25231 - DNA, 25 bp, Homo sapiens
tagtttggacatcaccctactgaaa

SEQ ID NO: 25232 - DNA, 25 bp, Homo sapiens
accaagtacactcgtgatatctata

SEQ ID NO: 25233 - DNA, 25 bp, Homo sapiens
atggcttcactgaaacctgcttttg

SEQ ID NO: 25234 - DNA, 25 bp, Homo sapiens
cacctctaccaagtacactcgtgat

SEQ ID NO: 25235 - DNA, 25 bp, Homo sapiens
gcctggttcttcgtttacgaggtca

SEQ ID NO: 25236 - DNA, 25 bp, Homo sapiens
gcttcactgaaacctgcttttgtaa

SEQ ID NO: 25237 - DNA, 25 bp, Homo sapiens
gtggtgcttttggccattggcatgt

SEQ ID NO: 25238 - DNA, 25 bp, Homo sapiens
gtttacgaggtcacctctaccaagt

SEQ ID NO: 25239 - DNA, 25 bp, Homo sapiens
tctgggttggcatctacgtgtgagc

SEQ ID NO: 25240 - DNA, 25 bp, Homo sapiens
tggcatctacgtgtgagcacccaag

SEQ ID NO: 25241 - DNA, 25 bp, Homo sapiens
ttactgttgctggaagtgtcccacc

SEQ ID NO: 25242 - DNA, 25 bp, Homo sapiens
ttttggccattggcatgttcttcac

SEQ ID NO: 25243 - DNA, 25 bp, Homo sapiens
agtaggacttgatccttcacagctc

SEQ ID NO: 25244 - DNA, 25 bp, Homo sapiens
atccttcacagctcccagttggaga

SEQ ID NO: 25245 - DNA, 25 bp, Homo sapiens
atgatgctactaatttgccactaaa

SEQ ID NO: 25246 - DNA, 25 bp, Homo sapiens
ccctgaatctcttctgacattggat

SEQ ID NO: 25247 - DNA, 25 bp, Homo sapiens
gcagtactggtcagacgtcatggag

SEQ ID NO: 25248 - DNA, 25 bp, Homo sapiens
ggaatgagcattctcttgttttaat

SEQ ID NO: 25249 - DNA, 25 bp, Homo sapiens
ggccaaaaccatgtgtgagtgttat

SEQ ID NO: 25250 - DNA, 25 bp, Homo sapiens
tacccagactcctgtgcagtactgg

SEQ ID NO: 25251 - DNA, 25 bp, Homo sapiens
tatactctcgagagaattcctctta

SEQ ID NO: 25252 - DNA, 25 bp, Homo sapiens
ttatactctatgtttctgtttattt

SEQ ID NO: 25253 - DNA, 25 bp, Homo sapiens
ttggatgttatttgcttatattctt

SEQ ID NO: 25254 - DNA, 25 bp, Homo sapiens
aaatcaagtgccagtggcgcccttt

SEQ ID NO: 25255 - DNA, 25 bp, Homo sapiens
caaatgtaccttctaatgctcagtt

SEQ ID NO: 25256 - DNA, 25 bp, Homo sapiens
gattacttgtactcttcttatgcta

SEQ ID NO: 25257 - DNA, 25 bp, Homo sapiens
ggcgccctttccatagagaatttgc

SEQ ID NO: 25258 - DNA, 25 bp, Homo sapiens
tcaaggccttggtcctggtgggatt

SEQ ID NO: 25259 - DNA, 25 bp, Homo sapiens
tcaataggtccaatctgctctcaag

SEQ ID NO: 25260 - DNA, 25 bp, Homo sapiens
tgctcagttgccaggttccaatgca

SEQ ID NO: 25261 - DNA, 25 bp, Homo sapiens
tggactccctttgtgtgggtggggt

SEQ ID NO: 25262 - DNA, 25 bp, Homo sapiens
tgtatggttttcacctggacaccgt

SEQ ID NO: 25263 - DNA, 25 bp, Homo sapiens
ttctggaacacattgctgcactttg

SEQ ID NO: 25264 - DNA, 25 bp, Homo sapiens
ttgcaactatgctcccatttacaaa

SEQ ID NO: 25265 - DNA, 25 bp, Homo sapiens
accagatgcgtcccaagatgttgat

SEQ ID NO: 25266 - DNA, 25 bp, Homo sapiens
ataccaagtatagcctatggcagaa

SEQ ID NO: 25267 - DNA, 25 bp, Homo sapiens
cagtgagggacgtcagacttggctc

SEQ ID NO: 25268 - DNA, 25 bp, Homo sapiens
ccagagccgggcacattgagctgtg

SEQ ID NO: 25269 - DNA, 25 bp, Homo sapiens
ccagggggcatgaccagatgcgtcc

SEQ ID NO: 25270 - DNA, 25 bp, Homo sapiens
gccacccctcctagtttgggaggag

SEQ ID NO: 25271 - DNA, 25 bp, Homo sapiens
gtcccaagatgttgatttttgctgt

SEQ ID NO: 25272 - DNA, 25 bp, Homo sapiens
tcagacttggctcagctcggggagc

SEQ ID NO: 25273 - DNA, 25 bp, Homo sapiens
tgccatccccagggggcatgaccag

SEQ ID NO: 25274 - DNA, 25 bp, Homo sapiens
tgttgtgtgtcatgccagtgaggga

SEQ ID NO: 25275 - DNA, 25 bp, Homo sapiens
tttgtaggagacttgccagagccgg

SEQ ID NO: 25276 - DNA, 25 bp, Homo sapiens
aatcagcagatattgggtccggtat

SEQ ID NO: 25277 - DNA, 25 bp, Homo sapiens
aatcctggctcataatcagtctcct

SEQ ID NO: 25278 - DNA, 25 bp, Homo sapiens
atcagtctcctttttatcagttttg

SEQ ID NO: 25279 - DNA, 25 bp, Homo sapiens
atgagcatggccacactgtcagtga

SEQ ID NO: 25280 - DNA, 25 bp, Homo sapiens
cttcctgcctttttcagattttcaa

SEQ ID NO: 25281 - DNA, 25 bp, Homo sapiens
ggctttcaagagtctagggtcagag

SEQ ID NO: 25282 - DNA, 25 bp, Homo sapiens
gtcagtgagtgttctttaggtggta

SEQ ID NO: 25283 - DNA, 25 bp, Homo sapiens
gttcaaggaaggcaccacaccagaa

SEQ ID NO: 25284 - DNA, 25 bp, Homo sapiens
tattgggtccggtataccaggtatt

SEQ ID NO: 25285 - DNA, 25 bp, Homo sapiens
tgtggtctattgtatatctttttct

SEQ ID NO: 25286 - DNA, 25 bp, Homo sapiens
tgtttgcagccttcgaagatgtaac

SEQ ID NO: 25287 - DNA, 25 bp, Homo sapiens
aaaatgcttttctggctgggcacag

SEQ ID NO: 25288 - DNA, 25 bp, Homo sapiens
aagtatctcagctcaactgaagaac

SEQ ID NO: 25289 - DNA, 25 bp, Homo sapiens
acctgttacggtttctggaagcagt

SEQ ID NO: 25290 - DNA, 25 bp, Homo sapiens
cttactattctttatgatacctcat

SEQ ID NO: 25291 - DNA, 25 bp, Homo sapiens
gagagctttaaaatcttactattct

SEQ ID NO: 25292 - DNA, 25 bp, Homo sapiens
gatacctcatttctaaatccttgat

SEQ ID NO: 25293 - DNA, 25 bp, Homo sapiens
gctagtcaagaggctgaggccagag

SEQ ID NO: 25294 - DNA, 25 bp, Homo sapiens
gctggatgtggtggcacacacctgt

SEQ ID NO: 25295 - DNA, 25 bp, Homo sapiens
gtaatcccaccactttgggagaccg

SEQ ID NO: 25296 - DNA, 25 bp, Homo sapiens
tcaagaggttgagaccatcctggcc

SEQ ID NO: 25297 - DNA, 25 bp, Homo sapiens
ttcctgcacctgttacggtttctgg

SEQ ID NO: 25298 - DNA, 25 bp, Homo sapiens
agaggtccgagtgacagccagtgag

SEQ ID NO: 25299 - DNA, 25 bp, Homo sapiens
atagacccaccatatggtccagcaa

SEQ ID NO: 25300 - DNA, 25 bp, Homo sapiens
cagtctctgccaatattgtccttgt

SEQ ID NO: 25301 - DNA, 25 bp, Homo sapiens
gaaggacatcttacagcttcccaat

SEQ ID NO: 25302 - DNA, 25 bp, Homo sapiens
gatgcatttgttcacgtctggagac

SEQ ID NO: 25303 - DNA, 25 bp, Homo sapiens
ggagactgcaaagcatacagcccag

SEQ ID NO: 25304 - DNA, 25 bp, Homo sapiens
gggacatgctgtgcagactgttgaa

SEQ ID NO: 25305 - DNA, 25 bp, Homo sapiens
ggttttaactacagacccagtctct

SEQ ID NO: 25306 - DNA, 25 bp, Homo sapiens
tattctgtcgcgtgttcaggatctt

SEQ ID NO: 25307 - DNA, 25 bp, Homo sapiens
tgtccttgtgaacttccttgaagat

SEQ ID NO: 25308 - DNA, 25 bp, Homo sapiens
tgtggctggggtcctgactatagac

SEQ ID NO: 25309 - DNA, 25 bp, Homo sapiens
actcattccaattacagggcctcga

SEQ ID NO: 25310 - DNA, 25 bp, Homo sapiens
agacgttcgaatgggtcgtcgtccg

SEQ ID NO: 25311 - DNA, 25 bp, Homo sapiens
cccgtcggcatgtattagctctaga

SEQ ID NO: 25312 - DNA, 25 bp, Homo sapiens
ccgctcccaagatccaactacgagc

SEQ ID NO: 25313 - DNA, 25 bp, Homo sapiens
gatctgataaatgcaccgatccccc

SEQ ID NO: 25314 - DNA, 25 bp, Homo sapiens
gcacggcgactaccatcgaaagttg

SEQ ID NO: 25315 - DNA, 25 bp, Homo sapiens
gctgccttccttggatgtggtagcc

SEQ ID NO: 25316 - DNA, 25 bp, Homo sapiens
ggggctgagggttggttttgatctg

SEQ ID NO: 25317 - DNA, 25 bp, Homo sapiens
tattgttattttcgtcactacctcc

SEQ ID NO: 25318 - DNA, 25 bp, Homo sapiens
tcgggagtgggtaatttgcgcgcct

SEQ ID NO: 25319 - DNA, 25 bp, Homo sapiens
ttacctgcagcaactttactatacg

SEQ ID NO: 25320 - DNA, 25 bp, Homo sapiens
aagcccctggaaatgcgtgtgacct

SEQ ID NO: 25321 - DNA, 25 bp, Homo sapiens
acatatccaattccagtaactctca

SEQ ID NO: 25322 - DNA, 25 bp, Homo sapiens
agtggtgtattgtcacagtagctta

SEQ ID NO: 25323 - DNA, 25 bp, Homo sapiens
attggaaagcgactgagcacaccct

SEQ ID NO: 25324 - DNA, 25 bp, Homo sapiens
attgtaagcatgacccaacctacca

SEQ ID NO: 25325 - DNA, 25 bp, Homo sapiens
ctaccaccctgtttttacatatcca

SEQ ID NO: 25326 - DNA, 25 bp, Homo sapiens
cttgcaacataactaccatctctct

SEQ ID NO: 25327 - DNA, 25 bp, Homo sapiens
gctttggggctaggcatctatattg

SEQ ID NO: 25328 - DNA, 25 bp, Homo sapiens
gtcagcaatgctattatctctaatt

SEQ ID NO: 25329 - DNA, 25 bp, Homo sapiens
gtgccaccagactagacctgtatca

SEQ ID NO: 25330 - DNA, 25 bp, Homo sapiens
tctgccagcacctactgagggaaag

SEQ ID NO: 25331 - DNA, 25 bp, Homo sapiens
aaccaaaccaagccctgttgtgctc

SEQ ID NO: 25332 - DNA, 25 bp, Homo sapiens
agacattgaatcaccaaggcctggg

SEQ ID NO: 25333 - DNA, 25 bp, Homo sapiens
atatatcaaatactttccttcccac

SEQ ID NO: 25334 - DNA, 25 bp, Homo sapiens
caaggcctgggatcaacctgggctg

SEQ ID NO: 25335 - DNA, 25 bp, Homo sapiens
cattatatgccttcactggcttctt

SEQ ID NO: 25336 - DNA, 25 bp, Homo sapiens
gatcagggcagcttaagtggtctaa

SEQ ID NO: 25337 - DNA, 25 bp, Homo sapiens
ggaactgaccattatatgccttcac

SEQ ID NO: 25338 - DNA, 25 bp, Homo sapiens
ggatacctttgattttgtgtgtttc

SEQ ID NO: 25339 - DNA, 25 bp, Homo sapiens
gtggtctaagaatccttcaggcatt

SEQ ID NO: 25340 - DNA, 25 bp, Homo sapiens
gtgtgtttcatgctctggatttttt

SEQ ID NO: 25341 - DNA, 25 bp, Homo sapiens
gttacagtgccataaaccttgttac

SEQ ID NO: 25342 - DNA, 25 bp, Homo sapiens
aagggctaccccataattatcagac

SEQ ID NO: 25343 - DNA, 25 bp, Homo sapiens
acttattgtaactcacttcctgtaa

SEQ ID NO: 25344 - DNA, 25 bp, Homo sapiens
ctgtggtgatcttaagcgtgtcttg

SEQ ID NO: 25345 - DNA, 25 bp, Homo sapiens
gcagctgggctcttaatgttactta

SEQ ID NO: 25346 - DNA, 25 bp, Homo sapiens
gcgtgtcttgagttccatgcaaatt

SEQ ID NO: 25347 - DNA, 25 bp, Homo sapiens
gtaagactcaatctactcttcaagt

SEQ ID NO: 25348 - DNA, 25 bp, Homo sapiens
gtaccctctatgactgtaattcctg

SEQ ID NO: 25349 - DNA, 25 bp, Homo sapiens
gtgtccataatcaaatcatcatctt

SEQ ID NO: 25350 - DNA, 25 bp, Homo sapiens
tcagcttcagtgcctgttcacaata

SEQ ID NO: 25351 - DNA, 25 bp, Homo sapiens
tcttcaagttgatgtaccctctatg

SEQ ID NO: 25352 - DNA, 25 bp, Homo sapiens
tctttttccattctgtaatcttaaa

SEQ ID NO: 25353 - DNA, 25 bp, Homo sapiens
aaaacacaaaacctcacaactgcct

SEQ ID NO: 25354 - DNA, 25 bp, Homo sapiens
aagtctgtacatattggagctctgg

SEQ ID NO: 25355 - DNA, 25 bp, Homo sapiens
atctggcaggtgcccttgatgctat

SEQ ID NO: 25356 - DNA, 25 bp, Homo sapiens
atgggcctggactctccagaaacta

SEQ ID NO: 25357 - DNA, 25 bp, Homo sapiens
ccagtatcacttgtttgggccctag

SEQ ID NO: 25358 - DNA, 25 bp, Homo sapiens
gactctccagaaactacttgggcca

SEQ ID NO: 25359 - DNA, 25 bp, Homo sapiens
gaggagttttagggcttggggagag

SEQ ID NO: 25360 - DNA, 25 bp, Homo sapiens
gagggaggacacatctggaggaaat

SEQ ID NO: 25361 - DNA, 25 bp, Homo sapiens
ggagctctgggagatgctggaataa

SEQ ID NO: 25362 - DNA, 25 bp, Homo sapiens
tctcgtgctctaggacctgcacggg

SEQ ID NO: 25363 - DNA, 25 bp, Homo sapiens
tgcctggcaagcccagtatcacttg

SEQ ID NO: 25364 - DNA, 25 bp, Homo sapiens
aattcggcgttgaaattgggccagt

SEQ ID NO: 25365 - DNA, 25 bp, Homo sapiens
ccaccgccattcacaagaactttga

SEQ ID NO: 25366 - DNA, 25 bp, Homo sapiens
cccatcatagatcttgctcctgtgg

SEQ ID NO: 25367 - DNA, 25 bp, Homo sapiens
gacacatcgacaatgagcaccacca

SEQ ID NO: 25368 - DNA, 25 bp, Homo sapiens
gactcttgaagtaatggctgatcct

SEQ ID NO: 25369 - DNA, 25 bp, Homo sapiens
gatgaccaatgacaatgaccacctt

SEQ ID NO: 25370 - DNA, 25 bp, Homo sapiens
gttcttcaagacacttgctctaagc

SEQ ID NO: 25371 - DNA, 25 bp, Homo sapiens
gttggcggcacagaccaggaattcg

SEQ ID NO: 25372 - DNA, 25 bp, Homo sapiens
tagattccggtatatcgttcttcaa

SEQ ID NO: 25373 - DNA, 25 bp, Homo sapiens
tgaagttgatcctgagactcttgaa

SEQ ID NO: 25374 - DNA, 25 bp, Homo sapiens
tgctcctgtggatgttggcggcaca

SEQ ID NO: 25375 - DNA, 25 bp, Homo sapiens
aaggttaccgatcaatgcatttcat

SEQ ID NO: 25376 - DNA, 25 bp, Homo sapiens
agacctagggctctggagggtgggg

SEQ ID NO: 25377 - DNA, 25 bp, Homo sapiens
cattcctttttcttcacttacaaga

SEQ ID NO: 25378 - DNA, 25 bp, Homo sapiens
gaaatggtttcacttgctctttgac

SEQ ID NO: 25379 - DNA, 25 bp, Homo sapiens
gaagatggcttttcctggacagcta

SEQ ID NO: 25380 - DNA, 25 bp, Homo sapiens
ggctgcgaatgggatcctgatggaa

SEQ ID NO: 25381 - DNA, 25 bp, Homo sapiens
ggtctactttttaatggctttcata

SEQ ID NO: 25382 - DNA, 25 bp, Homo sapiens
tgtaggtcattgcacctatctcagc

SEQ ID NO: 25383 - DNA, 25 bp, Homo sapiens
aaatataagccccaggccattccac

SEQ ID NO: 25384 - DNA, 25 bp, Homo sapiens
ataggaagcctctgtttaccctgaa

SEQ ID NO: 25385 - DNA, 25 bp, Homo sapiens
gaaacaggctctcagggtacctgac

SEQ ID NO: 25386 - DNA, 25 bp, Homo sapiens
gactgatggactgcggcaatcctgg

SEQ ID NO: 25387 - DNA, 25 bp, Homo sapiens
gcatatttccagtacattctttcag

SEQ ID NO: 25388 - DNA, 25 bp, Homo sapiens
ggccattccacttagtgtcttttca

SEQ ID NO: 25389 - DNA, 25 bp, Homo sapiens
gtagtacatacctgaccgggagtcc

SEQ ID NO: 25390 - DNA, 25 bp, Homo sapiens
tccaaccctgaacaagaccttacat

SEQ ID NO: 25391 - DNA, 25 bp, Homo sapiens
tgaacttcggtgcttctgttgtttg

SEQ ID NO: 25392 - DNA, 25 bp, Homo sapiens
tgaggtgagagagtcttcccgaggc

SEQ ID NO: 25393 - DNA, 25 bp, Homo sapiens
tggttcccactggcagcatggtaga

SEQ ID NO: 25394 - DNA, 25 bp, Homo sapiens
ccagcccctaactgaaatctgaagc

SEQ ID NO: 25395 - DNA, 25 bp, Homo sapiens
ctttctccttgcattgtgatgatct

SEQ ID NO: 25396 - DNA, 25 bp, Homo sapiens
gaatccatgtttgtgctttctctgg

SEQ ID NO: 25397 - DNA, 25 bp, Homo sapiens
gaatttagcctaacactcatcttgg

SEQ ID NO: 25398 - DNA, 25 bp, Homo sapiens
gatctagtaggcacgtctgtcaaca

SEQ ID NO: 25399 - DNA, 25 bp, Homo sapiens
gctttttatcgcttatttttcctcg

SEQ ID NO: 25400 - DNA, 25 bp, Homo sapiens
ggcgcaacgaactgcatttctttgg

SEQ ID NO: 25401 - DNA, 25 bp, Homo sapiens
gtctgtcaacaggacacatgcctcc

SEQ ID NO: 25402 - DNA, 25 bp, Homo sapiens
tcatctatctctgattgggcgcaac

SEQ ID NO: 25403 - DNA, 25 bp, Homo sapiens
tgaacacctcggcgattctgttagg

SEQ ID NO: 25404 - DNA, 25 bp, Homo sapiens
ttttatcgacttcccaactgggctt

SEQ ID NO: 25405 - DNA, 25 bp, Homo sapiens
aagacacacctgccagggtttgtgg

SEQ ID NO: 25406 - DNA, 25 bp, Homo sapiens
agggtgtgctgtttggagttcctgg

SEQ ID NO: 25407 - DNA, 25 bp, Homo sapiens
aggtgggagatgccatcccagcagt

SEQ ID NO: 25408 - DNA, 25 bp, Homo sapiens
cagccatggccccaatcaaggtggg

SEQ ID NO: 25409 - DNA, 25 bp, Homo sapiens
gacgtctcaagaggttctccatggt

SEQ ID NO: 25410 - DNA, 25 bp, Homo sapiens
gatgcctttgtgactggcgagtggg

SEQ ID NO: 25411 - DNA, 25 bp, Homo sapiens
gcagcggcagcaagacggtgcagtg

SEQ ID NO: 25412 - DNA, 25 bp, Homo sapiens
gggccgagccacaaaggcggaaggc

SEQ ID NO: 25413 - DNA, 25 bp, Homo sapiens
gtccatctttgggaatcgacgtctc

SEQ ID NO: 25414 - DNA, 25 bp, Homo sapiens
ttcacccctggatgttccaagacac

SEQ ID NO: 25415 - DNA, 25 bp, Homo sapiens
aaagtacaaagctcaccagtgcggt

SEQ ID NO: 25416 - DNA, 25 bp, Homo sapiens
acaaactagccctcaagacgggaat

SEQ ID NO: 25417 - DNA, 25 bp, Homo sapiens
acagccttccctgagaggacttaaa

SEQ ID NO: 25418 - DNA, 25 bp, Homo sapiens
aggtgacgcgtgggccaagtacatg

SEQ ID NO: 25419 - DNA, 25 bp, Homo sapiens
cagccgtggacgattctccaggact

SEQ ID NO: 25420 - DNA, 25 bp, Homo sapiens
cataactatttaatgcagcggcagc

SEQ ID NO: 25421 - DNA, 25 bp, Homo sapiens
gaaggaaaccgagatgcttcccgca

SEQ ID NO: 25422 - DNA, 25 bp, Homo sapiens
gcacttgcctcgtgagacttcatag

SEQ ID NO: 25423 - DNA, 25 bp, Homo sapiens
gggactctctgcgatgtacataact

SEQ ID NO: 25424 - DNA, 25 bp, Homo sapiens
ggtgacgatgataaaactcggcccc

SEQ ID NO: 25425 - DNA, 25 bp, Homo sapiens
tctccaggactctttttttaccttg

SEQ ID NO: 25426 - DNA, 25 bp, Homo sapiens
agccagctgaaacggactccatgag

SEQ ID NO: 25427 - DNA, 25 bp, Homo sapiens
agcgccttcctggagatagctggaa

SEQ ID NO: 25428 - DNA, 25 bp, Homo sapiens
ctgagagagacccgtttcctttcag

SEQ ID NO: 25429 - DNA, 25 bp, Homo sapiens
gacactaagtttttcctgttctggg

SEQ ID NO: 25430 - DNA, 25 bp, Homo sapiens
gcagtgggaatctctgtgctcatgc

SEQ ID NO: 25431 - DNA, 25 bp, Homo sapiens
gctgagttcctttcggtcagctgac

SEQ ID NO: 25432 - DNA, 25 bp, Homo sapiens
ggactcttctatcctaggactatga

SEQ ID NO: 25433 - DNA, 25 bp, Homo sapiens
ggagcagtgttctgaggactcttct

SEQ ID NO: 25434 - DNA, 25 bp, Homo sapiens
ggcgcacaaacagtctagccagcca

SEQ ID NO: 25435 - DNA, 25 bp, Homo sapiens
gggttaatcataaggagccccctgc

SEQ ID NO: 25436 - DNA, 25 bp, Homo sapiens
tggaaagcagtgctgaccatcctct

SEQ ID NO: 25437 - DNA, 25 bp, Homo sapiens
aaagggtttgggcgttgctaggctg

SEQ ID NO: 25438 - DNA, 25 bp, Homo sapiens
aacagcatgggctgccatgggccat

SEQ ID NO: 25439 - DNA, 25 bp, Homo sapiens
catcatttccatcccagtcaatgtc

SEQ ID NO: 25440 - DNA, 25 bp, Homo sapiens
cccaagggtgtctcatgctacaaga

SEQ ID NO: 25441 - DNA, 25 bp, Homo sapiens
cccagggcttctggctagaacccga

SEQ ID NO: 25442 - DNA, 25 bp, Homo sapiens
ccgagacggctacatgatccgccgc

SEQ ID NO: 25443 - DNA, 25 bp, Homo sapiens
gaaacccaggaattttgctacttgg

SEQ ID NO: 25444 - DNA, 25 bp, Homo sapiens
gccgctctctggaacagcatgggct

SEQ ID NO: 25445 - DNA, 25 bp, Homo sapiens
gtcccacattccagccataagtgac

SEQ ID NO: 25446 - DNA, 25 bp, Homo sapiens
gtggcctgagagccatctgtgacct

SEQ ID NO: 25447 - DNA, 25 bp, Homo sapiens
tctctgcacagtgaccttcacagca

SEQ ID NO: 25448 - DNA, 25 bp, Homo sapiens
ccagtgagagtctgatcttgttttt

SEQ ID NO: 25449 - DNA, 25 bp, Homo sapiens
ccgtgctgggacaccatacgggttg

SEQ ID NO: 25450 - DNA, 25 bp, Homo sapiens
cttactgtgattcctggcttcattt

SEQ ID NO: 25451 - DNA, 25 bp, Homo sapiens
ggcttcattttttgctgatggttcc

SEQ ID NO: 25452 - DNA, 25 bp, Homo sapiens
tactgtgattcctggcttcattttt

SEQ ID NO: 25453 - DNA, 25 bp, Homo sapiens
tccttagcaggtgccgtgctgggac

SEQ ID NO: 25454 - DNA, 25 bp, Homo sapiens
tgccgtgctgggacaccatacgggt

SEQ ID NO: 25455 - DNA, 25 bp, Homo sapiens
tgctgggacaccatacgggttggtt

SEQ ID NO: 25456 - DNA, 25 bp, Homo sapiens
ttagcaggtgccgtgctgggacacc

SEQ ID NO: 25457 - DNA, 25 bp, Homo sapiens
ttatggaaacaactggcctcagccc

SEQ ID NO: 25458 - DNA, 25 bp, Homo sapiens
ttcattttttgctgatggttccccc

SEQ ID NO: 25459 - DNA, 25 bp, Homo sapiens
agattccatatctccgtaaattaca

SEQ ID NO: 25460 - DNA, 25 bp, Homo sapiens
cagatcaagctgcaaaccacgtcct

SEQ ID NO: 25461 - DNA, 25 bp, Homo sapiens
gatacaggtctacattcatttctac

SEQ ID NO: 25462 - DNA, 25 bp, Homo sapiens
gttccccatttcagatgtccagtaa

SEQ ID NO: 25463 - DNA, 25 bp, Homo sapiens
tactatacccttcctctgaggttta

SEQ ID NO: 25464 - DNA, 25 bp, Homo sapiens
tcagaaccacagaccggccagaaat

SEQ ID NO: 25465 - DNA, 25 bp, Homo sapiens
tcatcacgcatgctctctgttgcgt

SEQ ID NO: 25466 - DNA, 25 bp, Homo sapiens
tctctcccaccattatatcagcgtg

SEQ ID NO: 25467 - DNA, 25 bp, Homo sapiens
ttaagggctgtcttacctttcactt

SEQ ID NO: 25468 - DNA, 25 bp, Homo sapiens
ttcacttccactgtcctgtagaaac

SEQ ID NO: 25469 - DNA, 25 bp, Homo sapiens
ttttcttgcaactctttgactctga

SEQ ID NO: 25470 - DNA, 25 bp, Homo sapiens
agggttgttacgaagctgcaggagc

SEQ ID NO: 25471 - DNA, 25 bp, Homo sapiens
ctcagtctggggcaaatgggcttcc

SEQ ID NO: 25472 - DNA, 25 bp, Homo sapiens
gaatttcacatctccaagggaccct

SEQ ID NO: 25473 - DNA, 25 bp, Homo sapiens
gacgcaccgggtgttgatggtcgag

SEQ ID NO: 25474 - DNA, 25 bp, Homo sapiens
gcagaacttcgatgtgaggcctcag

SEQ ID NO: 25475 - DNA, 25 bp, Homo sapiens
taagcattttcggtttctagggttg

SEQ ID NO: 25476 - DNA, 25 bp, Homo sapiens
tcacccattcctagctaagttctta

SEQ ID NO: 25477 - DNA, 25 bp, Homo sapiens
tcagtttccggtgcggcgaacacca

SEQ ID NO: 25478 - DNA, 25 bp, Homo sapiens
tcgagatggtctccgggagcggcga

SEQ ID NO: 25479 - DNA, 25 bp, Homo sapiens
ttcccaaacactcctactggttgga

SEQ ID NO: 25480 - DNA, 25 bp, Homo sapiens
ttttgccatgacttgttcgctgata

SEQ ID NO: 25481 - DNA, 25 bp, Homo sapiens
agctaaccacagggattcttttgta

SEQ ID NO: 25482 - DNA, 25 bp, Homo sapiens
ccacggcgtggacagctgatatttc

SEQ ID NO: 25483 - DNA, 25 bp, Homo sapiens
cccagctgctggcttgtgggtgtgg

SEQ ID NO: 25484 - DNA, 25 bp, Homo sapiens
ctggctgggctggtattttgtttga

SEQ ID NO: 25485 - DNA, 25 bp, Homo sapiens
gactcggacacactaaggttttgat

SEQ ID NO: 25486 - DNA, 25 bp, Homo sapiens
gagcagtgactaacgctcacataac

SEQ ID NO: 25487 - DNA, 25 bp, Homo sapiens
gcaagtagattcttccagtttttcc

SEQ ID NO: 25488 - DNA, 25 bp, Homo sapiens
ggccttctatgtgcttagccataac

SEQ ID NO: 25489 - DNA, 25 bp, Homo sapiens
ggtattttgtttgatcttcctggaa

SEQ ID NO: 25490 - DNA, 25 bp, Homo sapiens
tacacacatgtgagtctggctgggc

SEQ ID NO: 25491 - DNA, 25 bp, Homo sapiens
ttccccgaattggcataccacggcg

SEQ ID NO: 25492 - DNA, 25 bp, Homo sapiens
aacacttctgacccatagctcagta

SEQ ID NO: 25493 - DNA, 25 bp, Homo sapiens
acaagctggccttgtgttgctggtt

SEQ ID NO: 25494 - DNA, 25 bp, Homo sapiens
acagctgtggctgcttcacttagat

SEQ ID NO: 25495 - DNA, 25 bp, Homo sapiens
agttggtgttccgattttcacatcc

SEQ ID NO: 25496 - DNA, 25 bp, Homo sapiens
atctttctgctttgaaaactctcac

SEQ ID NO: 25497 - DNA, 25 bp, Homo sapiens
gaaggtgctcactaacagaggtaca

SEQ ID NO: 25498 - DNA, 25 bp, Homo sapiens
gaattccagaggtcacatcagcatc

SEQ ID NO: 25499 - DNA, 25 bp, Homo sapiens
gattttcacatccttccatgtattt

SEQ ID NO: 25500 - DNA, 25 bp, Homo sapiens
ggtacattactgcaatgttctctta

SEQ ID NO: 25501 - DNA, 25 bp, Homo sapiens
gtatttcctggggattgtttgcttt

SEQ ID NO: 25502 - DNA, 25 bp, Homo sapiens
tgctggttcctattcagtatttcct

SEQ ID NO: 25503 - DNA, 25 bp, Homo sapiens
acatcctagtttgcgtcagtgacag

SEQ ID NO: 25504 - DNA, 25 bp, Homo sapiens
accaccgtgaggctacttgaactgt

SEQ ID NO: 25505 - DNA, 25 bp, Homo sapiens
ccaactttccaggcagctagcagag

SEQ ID NO: 25506 - DNA, 25 bp, Homo sapiens
cccacgcattcctgctatactagat

SEQ ID NO: 25507 - DNA, 25 bp, Homo sapiens
gaacttactgcttagtctttgtact

SEQ ID NO: 25508 - DNA, 25 bp, Homo sapiens
gcttgaagatgtactgccacgggtg

SEQ ID NO: 25509 - DNA, 25 bp, Homo sapiens
ggcatctgcctaaaccagaatcttt

SEQ ID NO: 25510 - DNA, 25 bp, Homo sapiens
gtgattaaggggccaactttccagg

SEQ ID NO: 25511 - DNA, 25 bp, Homo sapiens
tcactttcattttttgccagatttc

SEQ ID NO: 25512 - DNA, 25 bp, Homo sapiens
tgatctagggcaggctgtcttccag

SEQ ID NO: 25513 - DNA, 25 bp, Homo sapiens
ttgccagatttctttgcactacttt

SEQ ID NO: 25514 - DNA, 25 bp, Homo sapiens
accgataggatgtctgtctgggctt

SEQ ID NO: 25515 - DNA, 25 bp, Homo sapiens
actgttgtcagcagatgagccgccc

SEQ ID NO: 25516 - DNA, 25 bp, Homo sapiens
agtcctgccctatatagagttcctc

SEQ ID NO: 25517 - DNA, 25 bp, Homo sapiens
cgttctcctgcattgtagtgcgggt

SEQ ID NO: 25518 - DNA, 25 bp, Homo sapiens
gacctatagccagcacacttagtcc

SEQ ID NO: 25519 - DNA, 25 bp, Homo sapiens
gagttcctcttcgggaagcttttga

SEQ ID NO: 25520 - DNA, 25 bp, Homo sapiens
gctatttgttcgtcatactgttgtc

SEQ ID NO: 25521 - DNA, 25 bp, Homo sapiens
ggctggctgacgtgccttagaaggt

SEQ ID NO: 25522 - DNA, 25 bp, Homo sapiens
ggctgtagacaaggccagggctggc

SEQ ID NO: 25523 - DNA, 25 bp, Homo sapiens
ggctttgctgcgggacagtctaact

SEQ ID NO: 25524 - DNA, 25 bp, Homo sapiens
tattctgcctctcactattgatttt

SEQ ID NO: 25525 - DNA, 25 bp, Homo sapiens
cggagaagcggattgggtcctgggc

SEQ ID NO: 25526 - DNA, 25 bp, Homo sapiens
gagaacacacactgctggtgacggt

SEQ ID NO: 25527 - DNA, 25 bp, Homo sapiens
gaggcagaaccgaggtcgggagccc

SEQ ID NO: 25528 - DNA, 25 bp, Homo sapiens
gagggtgtttgtggtgaagaggcag

SEQ ID NO: 25529 - DNA, 25 bp, Homo sapiens
gaggtcgggagcccattgatgtctg

SEQ ID NO: 25530 - DNA, 25 bp, Homo sapiens
gcggcatgaatgtgcccttcaagcg

SEQ ID NO: 25531 - DNA, 25 bp, Homo sapiens
gctgcaccgcggcatgaatgtgccc

SEQ ID NO: 25532 - DNA, 25 bp, Homo sapiens
gctggtgacggtgtcaggacagagg

SEQ ID NO: 25533 - DNA, 25 bp, Homo sapiens
ggagaatgatgagcaggcagccagt

SEQ ID NO: 25534 - DNA, 25 bp, Homo sapiens
ggagggcgagggtcggagaagcgga

SEQ ID NO: 25535 - DNA, 25 bp, Homo sapiens
tgaaggtgcagtgctggcgtcatct

SEQ ID NO: 25536 - DNA, 25 bp, Homo sapiens
actgtggcaccaattctaatgtaat

SEQ ID NO: 25537 - DNA, 25 bp, Homo sapiens
agttcatgtttcactgtttgcactt

SEQ ID NO: 25538 - DNA, 25 bp, Homo sapiens
atgaaacgattctctgctttttggt

SEQ ID NO: 25539 - DNA, 25 bp, Homo sapiens
gaacaatgggtttattcgctgatgt

SEQ ID NO: 25540 - DNA, 25 bp, Homo sapiens
gaagtccctaaactgcaaaatctaa

SEQ ID NO: 25541 - DNA, 25 bp, Homo sapiens
gatattgtgaattctgacttatact

SEQ ID NO: 25542 - DNA, 25 bp, Homo sapiens
ggatgtgatgggtctagtccagttt

SEQ ID NO: 25543 - DNA, 25 bp, Homo sapiens
ggggagcagagtccgagcttatcta

SEQ ID NO: 25544 - DNA, 25 bp, Homo sapiens
tgacaacacatacacacttgcctct

SEQ ID NO: 25545 - DNA, 25 bp, Homo sapiens
tggctctgcattgtcacctagagag

SEQ ID NO: 25546 - DNA, 25 bp, Homo sapiens
ttggttctgaacttgaagtccctaa

SEQ ID NO: 25547 - DNA, 25 bp, Homo sapiens
aactcgggttactgcacaactttag

SEQ ID NO: 25548 - DNA, 25 bp, Homo sapiens
aatgtcttatttactcctttatgtt

SEQ ID NO: 25549 - DNA, 25 bp, Homo sapiens
agaggagagccaagcgctagcatgc

SEQ ID NO: 25550 - DNA, 25 bp, Homo sapiens
agttcttgacttagtctgcaccgtc

SEQ ID NO: 25551 - DNA, 25 bp, Homo sapiens
ctgcattcatgccttaactcgggtt

SEQ ID NO: 25552 - DNA, 25 bp, Homo sapiens
gagccttctttggacttgatttgga

SEQ ID NO: 25553 - DNA, 25 bp, Homo sapiens
gtacatctcggtctgaacttcatcc

SEQ ID NO: 25554 - DNA, 25 bp, Homo sapiens
gtctgcaccgtcatctagattgtat

SEQ ID NO: 25555 - DNA, 25 bp, Homo sapiens
tcctgtgtcttgatagcatgggtgc

SEQ ID NO: 25556 - DNA, 25 bp, Homo sapiens
tctggtcaggttgaccctgagcctt

SEQ ID NO: 25557 - DNA, 25 bp, Homo sapiens
ttgcctctgcatatctgtgcacact

SEQ ID NO: 25558 - DNA, 25 bp, Homo sapiens
acaaggttgatgttctttttgttgt

SEQ ID NO: 25559 - DNA, 25 bp, Homo sapiens
aggtcttcttttggtcctgagttct

SEQ ID NO: 25560 - DNA, 25 bp, Homo sapiens
attcttgctctgtggtgttaaacat

SEQ ID NO: 25561 - DNA, 25 bp, Homo sapiens
cactgcagggctatctttatacttt

SEQ ID NO: 25562 - DNA, 25 bp, Homo sapiens
ccatttagcccaccttgagcaaagg

SEQ ID NO: 25563 - DNA, 25 bp, Homo sapiens
gaaacgtgatcaattcttgctctgt

SEQ ID NO: 25564 - DNA, 25 bp, Homo sapiens
gaattaagtcactgtttgccataaa

SEQ ID NO: 25565 - DNA, 25 bp, Homo sapiens
gcaaagggtagattccgtgttgttt

SEQ ID NO: 25566 - DNA, 25 bp, Homo sapiens
gcattattgtgctacctcaaaggta

SEQ ID NO: 25567 - DNA, 25 bp, Homo sapiens
gctcggctttactcttgattaataa

SEQ ID NO: 25568 - DNA, 25 bp, Homo sapiens
ttgcgtaaaaccatttagcccacct

SEQ ID NO: 25569 - DNA, 25 bp, Homo sapiens
aaatgctgccccgaaaatactatat

SEQ ID NO: 25570 - DNA, 25 bp, Homo sapiens
aatacaggatccttcagcactgagg

SEQ ID NO: 25571 - DNA, 25 bp, Homo sapiens
agtttgtgttctgaaagcctccgtg

SEQ ID NO: 25572 - DNA, 25 bp, Homo sapiens
ccccggaggcagacgccattggaga

SEQ ID NO: 25573 - DNA, 25 bp, Homo sapiens
ctccttttcctggttagactctgtt

SEQ ID NO: 25574 - DNA, 25 bp, Homo sapiens
gactctgttcaaccacattcttatg

SEQ ID NO: 25575 - DNA, 25 bp, Homo sapiens
gagacagcgcagagcagggggcggc

SEQ ID NO: 25576 - DNA, 25 bp, Homo sapiens
gagggggagcgagttcgcatctctc

SEQ ID NO: 25577 - DNA, 25 bp, Homo sapiens
tatgttggcagatctgcttccagat

SEQ ID NO: 25578 - DNA, 25 bp, Homo sapiens
tgctgctggatctttggggggaaat

SEQ ID NO: 25579 - DNA, 25 bp, Homo sapiens
ttttagagcaccatcactttcacat

SEQ ID NO: 25580 - DNA, 25 bp, Homo sapiens
catccacgcctcttttggacattaa

SEQ ID NO: 25581 - DNA, 25 bp, Homo sapiens
cctcccagactgtgtggccagttga

SEQ ID NO: 25582 - DNA, 25 bp, Homo sapiens
gatggagcagggctgtgagaggagg

SEQ ID NO: 25583 - DNA, 25 bp, Homo sapiens
ggatgcaggggaaatcttgtctgtt

SEQ ID NO: 25584 - DNA, 25 bp, Homo sapiens
gtcgccttcaaaactctcgtgtagg

SEQ ID NO: 25585 - DNA, 25 bp, Homo sapiens
gtgactgagttccctttatcaaacc

SEQ ID NO: 25586 - DNA, 25 bp, Homo sapiens
tcattgccgtttgagctgctgattt

SEQ ID NO: 25587 - DNA, 25 bp, Homo sapiens
tctccctcatttctggagcagggcc

SEQ ID NO: 25588 - DNA, 25 bp, Homo sapiens
ttatcaaacccttcaatgggcacaa

SEQ ID NO: 25589 - DNA, 25 bp, Homo sapiens
ttgagtgcttgattttaggttttat

SEQ ID NO: 25590 - DNA, 25 bp, Homo sapiens
tttatgaatgtccaaatctgtgttt

SEQ ID NO: 25591 - DNA, 25 bp, Homo sapiens
aaaactcatggcacctagtctttgg

SEQ ID NO: 25592 - DNA, 25 bp, Homo sapiens
aagcctgacgtgggttcagattcca

SEQ ID NO: 25593 - DNA, 25 bp, Homo sapiens
agaattgaactcccagtcatacacc

SEQ ID NO: 25594 - DNA, 25 bp, Homo sapiens
agattatttctgctagtcacttttt

SEQ ID NO: 25595 - DNA, 25 bp, Homo sapiens
cctctgagccttggctttctgtgta

SEQ ID NO: 25596 - DNA, 25 bp, Homo sapiens
ctgtgtatctctgccactgggataa

SEQ ID NO: 25597 - DNA, 25 bp, Homo sapiens
gaacgtgagtagacaagcttcatat

SEQ ID NO: 25598 - DNA, 25 bp, Homo sapiens
ggcacctagtctttggtccataaat

SEQ ID NO: 25599 - DNA, 25 bp, Homo sapiens
gtagcttgagtcattcgtacttatc

SEQ ID NO: 25600 - DNA, 25 bp, Homo sapiens
gtggggaccaatttctaaaactcat

SEQ ID NO: 25601 - DNA, 25 bp, Homo sapiens
tgtcatcagcaagaggcctcggacc

SEQ ID NO: 25602 - DNA, 25 bp, Homo sapiens
aacctacctctattgtatgtcactt

SEQ ID NO: 25603 - DNA, 25 bp, Homo sapiens
acctcctttgctccactcaaggaga

SEQ ID NO: 25604 - DNA, 25 bp, Homo sapiens
agcactctgacagtgttactcccta

SEQ ID NO: 25605 - DNA, 25 bp, Homo sapiens
caaggtcttctgatgtgtttcctcc

SEQ ID NO: 25606 - DNA, 25 bp, Homo sapiens
catcaagtgtgctagtcatccttcc

SEQ ID NO: 25607 - DNA, 25 bp, Homo sapiens
gcctgacataagcatttcctctgtg

SEQ ID NO: 25608 - DNA, 25 bp, Homo sapiens
gtttcctccaccgaatgttctggtg

SEQ ID NO: 25609 - DNA, 25 bp, Homo sapiens
tcaatgttaccacagcaggctttct

SEQ ID NO: 25610 - DNA, 25 bp, Homo sapiens
tcagaagccacatttggccaggcct

SEQ ID NO: 25611 - DNA, 25 bp, Homo sapiens
tccactttcgtgtcaccactgtaat

SEQ ID NO: 25612 - DNA, 25 bp, Homo sapiens
ttcctatgcatcttgcaggcctgac

SEQ ID NO: 25613 - DNA, 25 bp, Homo sapiens
aatacttttgttcatgtctagccca

SEQ ID NO: 25614 - DNA, 25 bp, Homo sapiens
aatcctggtttttaatgtatgcata

SEQ ID NO: 25615 - DNA, 25 bp, Homo sapiens
agctttgccttaaatactgcttgca

SEQ ID NO: 25616 - DNA, 25 bp, Homo sapiens
atactgagtcctttttctaatgtaa

SEQ ID NO: 25617 - DNA, 25 bp, Homo sapiens
atgtgccttttggggaatgaatact

SEQ ID NO: 25618 - DNA, 25 bp, Homo sapiens
ctgcttgcatactgatttacttaat

SEQ ID NO: 25619 - DNA, 25 bp, Homo sapiens
gaaacagtcttgcatctatgtattt

SEQ ID NO: 25620 - DNA, 25 bp, Homo sapiens
gaatctactgctgctaaagcacatt

SEQ ID NO: 25621 - DNA, 25 bp, Homo sapiens
gttcatgtctagcccactgggaatt

SEQ ID NO: 25622 - DNA, 25 bp, Homo sapiens
gttttcaccttatactgagtccttt

SEQ ID NO: 25623 - DNA, 25 bp, Homo sapiens
taagacctggctgaatcccagatgt

SEQ ID NO: 25624 - DNA, 25 bp, Homo sapiens
aaccgacagtggtgtcccagagagg

SEQ ID NO: 25625 - DNA, 25 bp, Homo sapiens
aatgcatcgagtctaattcttacct

SEQ ID NO: 25626 - DNA, 25 bp, Homo sapiens
caaattctgctgctaatcggtttcc

SEQ ID NO: 25627 - DNA, 25 bp, Homo sapiens
gaaagtccagtatacctgtaacaaa

SEQ ID NO: 25628 - DNA, 25 bp, Homo sapiens
gagtgagacagcaccttgtgggttt

SEQ ID NO: 25629 - DNA, 25 bp, Homo sapiens
gatctggttcctgaggtcttcggat

SEQ ID NO: 25630 - DNA, 25 bp, Homo sapiens
gcattaatgagacctggttttcctt

SEQ ID NO: 25631 - DNA, 25 bp, Homo sapiens
gtctaattcttacctctatcaaaaa

SEQ ID NO: 25632 - DNA, 25 bp, Homo sapiens
tgacgagacctcttcaaaaacccac

SEQ ID NO: 25633 - DNA, 25 bp, Homo sapiens
tgaggtcttcggatctgtgcaatga

SEQ ID NO: 25634 - DNA, 25 bp, Homo sapiens
ttcccttgtgatctggttcctgagg

SEQ ID NO: 25635 - DNA, 25 bp, Homo sapiens
agagtttgagtcccatagctgatga

SEQ ID NO: 25636 - DNA, 25 bp, Homo sapiens
ctacttaccagctgggtttgacctt

SEQ ID NO: 25637 - DNA, 25 bp, Homo sapiens
ctctccactcctccaagagtttgag

SEQ ID NO: 25638 - DNA, 25 bp, Homo sapiens
ctctgaggtgtctttggctctgtgt

SEQ ID NO: 25639 - DNA, 25 bp, Homo sapiens
gaaagaatttacatatgggctcccc

SEQ ID NO: 25640 - DNA, 25 bp, Homo sapiens
gaatttctagcttcactacttacca

SEQ ID NO: 25641 - DNA, 25 bp, Homo sapiens
ggacctagtggtcagcttataccca

SEQ ID NO: 25642 - DNA, 25 bp, Homo sapiens
ggagcatatgtcctttaactttcaa

SEQ ID NO: 25643 - DNA, 25 bp, Homo sapiens
gtatattgcgtagtcagatgtcagg

SEQ ID NO: 25644 - DNA, 25 bp, Homo sapiens
gtcagcttatacccagactatctct

SEQ ID NO: 25645 - DNA, 25 bp, Homo sapiens
tgtctcctaatttctctgaggtgtc

SEQ ID NO: 25646 - DNA, 25 bp, Homo sapiens
aggagtgagcgcgtgcagaaggcag

SEQ ID NO: 25647 - DNA, 25 bp, Homo sapiens
aggtgctgagcccaagagactctgg

SEQ ID NO: 25648 - DNA, 25 bp, Homo sapiens
caagaagcagcccttctgtgacggc

SEQ ID NO: 25649 - DNA, 25 bp, Homo sapiens
caagttcaaggcccaagagacccgc

SEQ ID NO: 25650 - DNA, 25 bp, Homo sapiens
cgatggcacccacaggagtgagcgc

SEQ ID NO: 25651 - DNA, 25 bp, Homo sapiens
gacctgaacccgcggcgggacatct

SEQ ID NO: 25652 - DNA, 25 bp, Homo sapiens
gcctatctccactcaagttcaaggc

SEQ ID NO: 25653 - DNA, 25 bp, Homo sapiens
ggccctggttcaatgtttgctgatg

SEQ ID NO: 25654 - DNA, 25 bp, Homo sapiens
ggtggcagggaaaacctacaggtgg

SEQ ID NO: 25655 - DNA, 25 bp, Homo sapiens
gtctggggcaggcgggagtgggccc

SEQ ID NO: 25656 - DNA, 25 bp, Homo sapiens
taacctaaaagtctccagtctgggg

SEQ ID NO: 25657 - DNA, 25 bp, Homo sapiens
aaatgctttcactccttagctttgc

SEQ ID NO: 25658 - DNA, 25 bp, Homo sapiens
aatctgtacttgggagcagcctgct

SEQ ID NO: 25659 - DNA, 25 bp, Homo sapiens
ccactgtcacaatccctttcagaaa

SEQ ID NO: 25660 - DNA, 25 bp, Homo sapiens
gagctgcgtccacagggaacaaagc

SEQ ID NO: 25661 - DNA, 25 bp, Homo sapiens
gggcctctgaagtatctttctacaa

SEQ ID NO: 25662 - DNA, 25 bp, Homo sapiens
tacaaacgcagacaagctccactac

SEQ ID NO: 25663 - DNA, 25 bp, Homo sapiens
tatgtgggcagaacatgctctcctt

SEQ ID NO: 25664 - DNA, 25 bp, Homo sapiens
tccctttccagttctaccaaatctg

SEQ ID NO: 25665 - DNA, 25 bp, Homo sapiens
tcctccctggagtgctctatgtggg

SEQ ID NO: 25666 - DNA, 25 bp, Homo sapiens
tgccaggatgctcaagtccactgtc

SEQ ID NO: 25667 - DNA, 25 bp, Homo sapiens
tggaaggtgtcttctctatggcctg

SEQ ID NO: 25668 - DNA, 25 bp, Homo sapiens
aaagatccaagcagtttggtcccaa

SEQ ID NO: 25669 - DNA, 25 bp, Homo sapiens
accaccttccttaatcgatcatagg

SEQ ID NO: 25670 - DNA, 25 bp, Homo sapiens
acgtgaggtgtggtaaggagcaact

SEQ ID NO: 25671 - DNA, 25 bp, Homo sapiens
aggagcaactccacgtgatacatgg

SEQ ID NO: 25672 - DNA, 25 bp, Homo sapiens
ccaccccgttgctgggaggatcagc

SEQ ID NO: 25673 - DNA, 25 bp, Homo sapiens
cttaaactcctccttgacatacaaa

SEQ ID NO: 25674 - DNA, 25 bp, Homo sapiens
gaacacaaggtggtcggaaaggcct

SEQ ID NO: 25675 - DNA, 25 bp, Homo sapiens
ggaaatagggctcaggggcacgtga

SEQ ID NO: 25676 - DNA, 25 bp, Homo sapiens
ggagaacggggaagtccagcccaga

SEQ ID NO: 25677 - DNA, 25 bp, Homo sapiens
gggaggatcagcaggactagaaagt

SEQ ID NO: 25678 - DNA, 25 bp, Homo sapiens
ttagaaaacagaccagacactgccc

SEQ ID NO: 25679 - DNA, 25 bp, Homo sapiens
agaaccagcaatcattccactgtcc

SEQ ID NO: 25680 - DNA, 25 bp, Homo sapiens
catgatgagcataacagccggccgt

SEQ ID NO: 25681 - DNA, 25 bp, Homo sapiens
ctccccttcccaactgaagtggtat

SEQ ID NO: 25682 - DNA, 25 bp, Homo sapiens
gatgctagatcaaataagctctgaa

SEQ ID NO: 25683 - DNA, 25 bp, Homo sapiens
gatgtgactcagaatttaggaacca

SEQ ID NO: 25684 - DNA, 25 bp, Homo sapiens
gcatctcttaagtgccatgatgagc

SEQ ID NO: 25685 - DNA, 25 bp, Homo sapiens
gctttgcatagccctggtttagaaa

SEQ ID NO: 25686 - DNA, 25 bp, Homo sapiens
ggaaaggtttgttaagcatctctta

SEQ ID NO: 25687 - DNA, 25 bp, Homo sapiens
ggaactctagtgctttgcatagccc

SEQ ID NO: 25688 - DNA, 25 bp, Homo sapiens
ggctagctctttccaaaagcattca

SEQ ID NO: 25689 - DNA, 25 bp, Homo sapiens
gtggtatgaggctagctctttccaa

SEQ ID NO: 25690 - DNA, 25 bp, Homo sapiens
aagcctgacgataggccgctggact

SEQ ID NO: 25691 - DNA, 25 bp, Homo sapiens
agtctccatggccgtgcttggagta

SEQ ID NO: 25692 - DNA, 25 bp, Homo sapiens
ctaaggtctttggccacagttcctg

SEQ ID NO: 25693 - DNA, 25 bp, Homo sapiens
gaacctatgctttccttttggcaaa

SEQ ID NO: 25694 - DNA, 25 bp, Homo sapiens
gtatgagtcccattctgcagtgaac

SEQ ID NO: 25695 - DNA, 25 bp, Homo sapiens
gtggcaactgattacttgaccgtac

SEQ ID NO: 25696 - DNA, 25 bp, Homo sapiens
taaaacagtccgctgtgcctgttct

SEQ ID NO: 25697 - DNA, 25 bp, Homo sapiens
tcactgattttctctgggcaatgta

SEQ ID NO: 25698 - DNA, 25 bp, Homo sapiens
ttcaaacgggtcaagagccccacgc

SEQ ID NO: 25699 - DNA, 25 bp, Homo sapiens
ttctccgggcacacaggttcaaacg

SEQ ID NO: 25700 - DNA, 25 bp, Homo sapiens
ttgaccgtacgcatgaccgttcaga

SEQ ID NO: 25701 - DNA, 25 bp, Homo sapiens
acagctagtagctatgcacagtcta

SEQ ID NO: 25702 - DNA, 25 bp, Homo sapiens
ctattactagcctgcaccatgatcc

SEQ ID NO: 25703 - DNA, 25 bp, Homo sapiens
ctggttacattcacttccctatgaa

SEQ ID NO: 25704 - DNA, 25 bp, Homo sapiens
gagggatgatttcagagcactttga

SEQ ID NO: 25705 - DNA, 25 bp, Homo sapiens
gattagatatcttattttgttccca

SEQ ID NO: 25706 - DNA, 25 bp, Homo sapiens
gcaatggctcagtgaacctctattc

SEQ ID NO: 25707 - DNA, 25 bp, Homo sapiens
gcaattctgaatcctattactagcc

SEQ ID NO: 25708 - DNA, 25 bp, Homo sapiens
gcacagtctatcagcaatggctcag

SEQ ID NO: 25709 - DNA, 25 bp, Homo sapiens
ggaagtaggagcatcacaacaacca

SEQ ID NO: 25710 - DNA, 25 bp, Homo sapiens
tagaatcccttacatggtcgatata

SEQ ID NO: 25711 - DNA, 25 bp, Homo sapiens
tattttgttcccaagatccactgca

SEQ ID NO: 25712 - DNA, 25 bp, Homo sapiens
attttcaccaatatattcacctagt

SEQ ID NO: 25713 - DNA, 25 bp, Homo sapiens
gaaatgcctattcgtgacttagcca

SEQ ID NO: 25714 - DNA, 25 bp, Homo sapiens
gaatgagccccattccttattttga

SEQ ID NO: 25715 - DNA, 25 bp, Homo sapiens
gacattaactggtttccaaggctgc

SEQ ID NO: 25716 - DNA, 25 bp, Homo sapiens
gacttagccaatgttgtttcttttt

SEQ ID NO: 25717 - DNA, 25 bp, Homo sapiens
gaggcctgtgtaatgcatttgtgtg

SEQ ID NO: 25718 - DNA, 25 bp, Homo sapiens
gattggccatttatcatgtacatat

SEQ ID NO: 25719 - DNA, 25 bp, Homo sapiens
taattccctgctgaggacattaact

SEQ ID NO: 25720 - DNA, 25 bp, Homo sapiens
tacccctggtaaccctgtgatatta

SEQ ID NO: 25721 - DNA, 25 bp, Homo sapiens
tccatttttgtcatacccctggtaa

SEQ ID NO: 25722 - DNA, 25 bp, Homo sapiens
tgctaatggatctctgttcttgttt

SEQ ID NO: 25723 - DNA, 25 bp, Homo sapiens
aagtatggcccagaagagcccttgc

SEQ ID NO: 25724 - DNA, 25 bp, Homo sapiens
actcttgtcatacctaattgttcct

SEQ ID NO: 25725 - DNA, 25 bp, Homo sapiens
ccaaagatgctcctgagtgcaagag

SEQ ID NO: 25726 - DNA, 25 bp, Homo sapiens
cctttgtgtatctcagccctacaaa

SEQ ID NO: 25727 - DNA, 25 bp, Homo sapiens
ctacaaagaaaaacactcccactct

SEQ ID NO: 25728 - DNA, 25 bp, Homo sapiens
cttgcctcccactgaggagactttg

SEQ ID NO: 25729 - DNA, 25 bp, Homo sapiens
gcaagagcaggcaaggcagagtcct

SEQ ID NO: 25730 - DNA, 25 bp, Homo sapiens
tcccactcttgtcatacctaattgt

SEQ ID NO: 25731 - DNA, 25 bp, Homo sapiens
tcccccaaagatgctcctgagtgca

SEQ ID NO: 25732 - DNA, 25 bp, Homo sapiens
tgtcatacctaattgttcctgctgt

SEQ ID NO: 25733 - DNA, 25 bp, Homo sapiens
ttgtgtatctcagccctacaaagaa

SEQ ID NO: 25734 - DNA, 25 bp, Homo sapiens
aagccattgctttactatattgcgt

SEQ ID NO: 25735 - DNA, 25 bp, Homo sapiens
acctcatatgttaacagcacctacc

SEQ ID NO: 25736 - DNA, 25 bp, Homo sapiens
agacttaccactttaacctcatatg

SEQ ID NO: 25737 - DNA, 25 bp, Homo sapiens
gaatcaggctgaaggaatcatgcag

SEQ ID NO: 25738 - DNA, 25 bp, Homo sapiens
gacagatttcactatattcttatgt

SEQ ID NO: 25739 - DNA, 25 bp, Homo sapiens
gacattgtttttgacagatttcact

SEQ ID NO: 25740 - DNA, 25 bp, Homo sapiens
ggctactttattgtgagacttacca

SEQ ID NO: 25741 - DNA, 25 bp, Homo sapiens
tatgtgcacagttctctttatcagg

SEQ ID NO: 25742 - DNA, 25 bp, Homo sapiens
tgaataaactttgtactccctctaa

SEQ ID NO: 25743 - DNA, 25 bp, Homo sapiens
tttactatattgcgttgccacttta

SEQ ID NO: 25744 - DNA, 25 bp, Homo sapiens
tttctaggtgctttgtgattctttc

SEQ ID NO: 25745 - DNA, 25 bp, Homo sapiens
aaactcctgcgtctggtgaaggaga

SEQ ID NO: 25746 - DNA, 25 bp, Homo sapiens
accataagccttcacagacgccaga

SEQ ID NO: 25747 - DNA, 25 bp, Homo sapiens
accctcgagcttcaccatggggtgt

SEQ ID NO: 25748 - DNA, 25 bp, Homo sapiens
ataagccttcacagacgccagagca

SEQ ID NO: 25749 - DNA, 25 bp, Homo sapiens
cataagccttcacagacgccagagc

SEQ ID NO: 25750 - DNA, 25 bp, Homo sapiens
ccataagccttcacagacgccagag

SEQ ID NO: 25751 - DNA, 25 bp, Homo sapiens
cctgaggcctggagacccaactggc

SEQ ID NO: 25752 - DNA, 25 bp, Homo sapiens
ctgagttccaagagaaggggttcag

SEQ ID NO: 25753 - DNA, 25 bp, Homo sapiens
gccctgaggcctggagacccaactg

SEQ ID NO: 25754 - DNA, 25 bp, Homo sapiens
gccctgggactccaacacaaaaaga

SEQ ID NO: 25755 - DNA, 25 bp, Homo sapiens
ggccctgggactccaacacaaaaag

SEQ ID NO: 25756 - DNA, 25 bp, Homo sapiens
gggagttctcggtgctcaagatccg

SEQ ID NO: 25757 - DNA, 25 bp, Homo sapiens
gggctttagtttagtcccagaaatg

SEQ ID NO: 25758 - DNA, 25 bp, Homo sapiens
taagccttcacagacgccagagcag

SEQ ID NO: 25759 - DNA, 25 bp, Homo sapiens
tctatgactttgaaccagcgctcaa

SEQ ID NO: 25760 - DNA, 25 bp, Homo sapiens
ttctgagttccaagagaaggggttc

SEQ ID NO: 25761 - DNA, 25 bp, Homo sapiens
aggtgtcacaagcaatgaagctatg

SEQ ID NO: 25762 - DNA, 25 bp, Homo sapiens
attctgaggtgtcacaagcaatgaa

SEQ ID NO: 25763 - DNA, 25 bp, Homo sapiens
ctccattctgaggtgtcacaagcaa

SEQ ID NO: 25764 - DNA, 25 bp, Homo sapiens
ctggagtccctggtgactccattct

SEQ ID NO: 25765 - DNA, 25 bp, Homo sapiens
ctggtgactccattctgaggtgtca

SEQ ID NO: 25766 - DNA, 25 bp, Homo sapiens
gactccattctgaggtgtcacaagc

SEQ ID NO: 25767 - DNA, 25 bp, Homo sapiens
gagtccctggtgactccattctgag

SEQ ID NO: 25768 - DNA, 25 bp, Homo sapiens
ggtgactccattctgaggtgtcaca

SEQ ID NO: 25769 - DNA, 25 bp, Homo sapiens
gtccctggtgactccattctgaggt

SEQ ID NO: 25770 - DNA, 25 bp, Homo sapiens
gtgtgacaggggaaccgtagacttt

SEQ ID NO: 25771 - DNA, 25 bp, Homo sapiens
tccattctgaggtgtcacaagcaat

SEQ ID NO: 25772 - DNA, 25 bp, Homo sapiens
tccctggtgactccattctgaggtg

SEQ ID NO: 25773 - DNA, 25 bp, Homo sapiens
tctgaggtgtcacaagcaatgaagc

SEQ ID NO: 25774 - DNA, 25 bp, Homo sapiens
tgaggtgtcacaagcaatgaagcta

SEQ ID NO: 25775 - DNA, 25 bp, Homo sapiens
tgtgacaggggaaccgtagacttta

SEQ ID NO: 25776 - DNA, 25 bp, Homo sapiens
ttctgaggtgtcacaagcaatgaag

SEQ ID NO: 25777 - DNA, 25 bp, Homo sapiens
acaaatctttcatccatacctgtgc

SEQ ID NO: 25778 - DNA, 25 bp, Homo sapiens
acttggtgtccaacagagtctaggc

SEQ ID NO: 25779 - DNA, 25 bp, Homo sapiens
cagtcagtttttctcttaagtgcct

SEQ ID NO: 25780 - DNA, 25 bp, Homo sapiens
cgacgaacactacgagtaccggcat

SEQ ID NO: 25781 - DNA, 25 bp, Homo sapiens
cgctctcgtttcattttctgcagcg

SEQ ID NO: 25782 - DNA, 25 bp, Homo sapiens
gataaaagttcttccagtcagtttt

SEQ ID NO: 25783 - DNA, 25 bp, Homo sapiens
gcaacagagctcagttaaatgcaac

SEQ ID NO: 25784 - DNA, 25 bp, Homo sapiens
gtgcatgagctgtattcttcacagc

SEQ ID NO: 25785 - DNA, 25 bp, Homo sapiens
tattcttctctttagacgacctctt

SEQ ID NO: 25786 - DNA, 25 bp, Homo sapiens
tctctttagacgacctcttccaaaa

SEQ ID NO: 25787 - DNA, 25 bp, Homo sapiens
ttatgttacccagagaactttccaa

SEQ ID NO: 25788 - DNA, 25 bp, Homo sapiens
atgagtttgccagccagatcaacct

SEQ ID NO: 25789 - DNA, 25 bp, Homo sapiens
caacaagcaggtcatccgtgtctac

SEQ ID NO: 25790 - DNA, 25 bp, Homo sapiens
caacagctacaagttggcccggtgg

SEQ ID NO: 25791 - DNA, 25 bp, Homo sapiens
caagcttggttatgtgtctcggtac

SEQ ID NO: 25792 - DNA, 25 bp, Homo sapiens
gaagctggactctcagcgaggggct

SEQ ID NO: 25793 - DNA, 25 bp, Homo sapiens
ggaatgtgtgtctaacttgctctct

SEQ ID NO: 25794 - DNA, 25 bp, Homo sapiens
ggcaaatacctcatcctcaaggacc

SEQ ID NO: 25795 - DNA, 25 bp, Homo sapiens
ggcactgtaatggcgttgactggcg

SEQ ID NO: 25796 - DNA, 25 bp, Homo sapiens
tacgctgcgtcattgacatctgcat

SEQ ID NO: 25797 - DNA, 25 bp, Homo sapiens
tcggtaccacgtgaaagactcctca

SEQ ID NO: 25798 - DNA, 25 bp, Homo sapiens
tgctggctggatctgagtacctcaa

SEQ ID NO: 25799 - DNA, 25 bp, Homo sapiens
aagacagcttggtctggtctgtgca

SEQ ID NO: 25800 - DNA, 25 bp, Homo sapiens
agggcaggtttctggagactccctt

SEQ ID NO: 25801 - DNA, 25 bp, Homo sapiens
caaatgggattgtccccgcactagt

SEQ ID NO: 25802 - DNA, 25 bp, Homo sapiens
ctaacattgttcaggcgcatggccc

SEQ ID NO: 25803 - DNA, 25 bp, Homo sapiens
gatggattttatttcactcacactc

SEQ ID NO: 25804 - DNA, 25 bp, Homo sapiens
gccgacgatccaaatgccgtgtgtc

SEQ ID NO: 25805 - DNA, 25 bp, Homo sapiens
ggcttcttttgtcctaggtacgcca

SEQ ID NO: 25806 - DNA, 25 bp, Homo sapiens
tagagaatccatgtcgctctgacac

SEQ ID NO: 25807 - DNA, 25 bp, Homo sapiens
tgtgtacacgaactcggcttctttt

SEQ ID NO: 25808 - DNA, 25 bp, Homo sapiens
tttccacatctgtcttcattagcag

SEQ ID NO: 25809 - DNA, 25 bp, Homo sapiens
tttccggggcctacaggcgtgtaag

SEQ ID NO: 25810 - DNA, 25 bp, Homo sapiens
atacggcatcatctgcatggaggat

SEQ ID NO: 25811 - DNA, 25 bp, Homo sapiens
ccttcaaattgtcttctccacgagg

SEQ ID NO: 25812 - DNA, 25 bp, Homo sapiens
cgaaaggtgttgcagcttcttcgcc

SEQ ID NO: 25813 - DNA, 25 bp, Homo sapiens
gacagataacgctttgattgctcga

SEQ ID NO: 25814 - DNA, 25 bp, Homo sapiens
gattgctcgatctcttggtaaatac

SEQ ID NO: 25815 - DNA, 25 bp, Homo sapiens
gctggcaacttctatgtacctgcag

SEQ ID NO: 25816 - DNA, 25 bp, Homo sapiens
ggcaaataacttcctgtggcccttc

SEQ ID NO: 25817 - DNA, 25 bp, Homo sapiens
gggaggaccagatcaacaggcttat

SEQ ID NO: 25818 - DNA, 25 bp, Homo sapiens
gggtaccccaatctgaagtcagtaa

SEQ ID NO: 25819 - DNA, 25 bp, Homo sapiens
gtacctgcagaacccaaattggcgt

SEQ ID NO: 25820 - DNA, 25 bp, Homo sapiens
ttcgccttcgtcaaatcttcaatgg

SEQ ID NO: 25821 - DNA, 25 bp, Homo sapiens
aacatgcctctcgcaaaggatctcc

SEQ ID NO: 25822 - DNA, 25 bp, Homo sapiens
aattcctacttcatggatgtgaaat

SEQ ID NO: 25823 - DNA, 25 bp, Homo sapiens
atgctataaaatcaccacggtcttt

SEQ ID NO: 25824 - DNA, 25 bp, Homo sapiens
cctacgcacacgagaacatgcctct

SEQ ID NO: 25825 - DNA, 25 bp, Homo sapiens
ctataaaatcaccacggtctttagc

SEQ ID NO: 25826 - DNA, 25 bp, Homo sapiens
gaaatgcccaggatgctataaaatc

SEQ ID NO: 25827 - DNA, 25 bp, Homo sapiens
gcacacgagaacatgcctctcgcaa

SEQ ID NO: 25828 - DNA, 25 bp, Homo sapiens
ggtctttagccatgcacaaacggta

SEQ ID NO: 25829 - DNA, 25 bp, Homo sapiens
tccttcatccctctccagaagagga

SEQ ID NO: 25830 - DNA, 25 bp, Homo sapiens
tctcgcaaaggatctccttcatccc

SEQ ID NO: 25831 - DNA, 25 bp, Homo sapiens
ttagccatgcacaaacggtagtttt

SEQ ID NO: 25832 - DNA, 25 bp, Homo sapiens
aagatctgaattgctgtgtatgtta

SEQ ID NO: 25833 - DNA, 25 bp, Homo sapiens
acgattactatagtccagtttacca

SEQ ID NO: 25834 - DNA, 25 bp, Homo sapiens
agtggtgttgacattctggatcttc

SEQ ID NO: 25835 - DNA, 25 bp, Homo sapiens
ctatttttttctcatacgattacta

SEQ ID NO: 25836 - DNA, 25 bp, Homo sapiens
gaaccagtttctaaccagcctgtga

SEQ ID NO: 25837 - DNA, 25 bp, Homo sapiens
gtgacgtcacttacctgtctaacgt

SEQ ID NO: 25838 - DNA, 25 bp, Homo sapiens
gttacgctgtattcagaaccagttt

SEQ ID NO: 25839 - DNA, 25 bp, Homo sapiens
gttctacttactgtattaactggca

SEQ ID NO: 25840 - DNA, 25 bp, Homo sapiens
tacctgtctaacgtggtgtgggaga

SEQ ID NO: 25841 - DNA, 25 bp, Homo sapiens
tcttgagatgattgcttaccttaaa

SEQ ID NO: 25842 - DNA, 25 bp, Homo sapiens
tgatcccatcaacactattcttgta

SEQ ID NO: 25843 - DNA, 25 bp, Homo sapiens
aaggatggagacctcattgccacca

SEQ ID NO: 25844 - DNA, 25 bp, Homo sapiens
aggaggagttcacagctttcctgca

SEQ ID NO: 25845 - DNA, 25 bp, Homo sapiens
atgacttatttgttggcagccaggc

SEQ ID NO: 25846 - DNA, 25 bp, Homo sapiens
atgccacctacggctacgttttaga

SEQ ID NO: 25847 - DNA, 25 bp, Homo sapiens
ctttcctgcaccctgaggagtatga

SEQ ID NO: 25848 - DNA, 25 bp, Homo sapiens
gagaccaaagactggatccttccct

SEQ ID NO: 25849 - DNA, 25 bp, Homo sapiens
gcagaggcagaagccaggcacctgg

SEQ ID NO: 25850 - DNA, 25 bp, Homo sapiens
gcagccaggccacagattttgggga

SEQ ID NO: 25851 - DNA, 25 bp, Homo sapiens
gccaggcacctggtctatgaatcag

SEQ ID NO: 25852 - DNA, 25 bp, Homo sapiens
ggggaggccttagtacggcatgatg

SEQ ID NO: 25853 - DNA, 25 bp, Homo sapiens
tccttccctcagactatgatcatgc

SEQ ID NO: 25854 - DNA, 25 bp, Homo sapiens
aagctgagtcagctacgggcaagcg

SEQ ID NO: 25855 - DNA, 25 bp, Homo sapiens
agaccgacgaggatgactagacagc

SEQ ID NO: 25856 - DNA, 25 bp, Homo sapiens
agctccgaaatcaccaccaaggact

SEQ ID NO: 25857 - DNA, 25 bp, Homo sapiens
atcaccaccaaggacttaaaggaga

SEQ ID NO: 25858 - DNA, 25 bp, Homo sapiens
atgtcagacgcagccgtagacacca

SEQ ID NO: 25859 - DNA, 25 bp, Homo sapiens
caccatgtcagacgcagccgtagac

SEQ ID NO: 25860 - DNA, 25 bp, Homo sapiens
cagctacgggcaagcgggcagctga

SEQ ID NO: 25861 - DNA, 25 bp, Homo sapiens
gaaaagccatctttgcattgttcct

SEQ ID NO: 25862 - DNA, 25 bp, Homo sapiens
gaagcagaagaccgacgaggatgac

SEQ ID NO: 25863 - DNA, 25 bp, Homo sapiens
gatgaggatgacgatgtcgatacca

SEQ ID NO: 25864 - DNA, 25 bp, Homo sapiens
tgaactctcgctttctttttaatcc

SEQ ID NO: 25865 - DNA, 25 bp, Homo sapiens
aaacctctatatttctttcgttcat

SEQ ID NO: 25866 - DNA, 25 bp, Homo sapiens
aggtggttgtagctgatgagttatt

SEQ ID NO: 25867 - DNA, 25 bp, Homo sapiens
atttctaaaacctgtgatgccctaa

SEQ ID NO: 25868 - DNA, 25 bp, Homo sapiens
gagctctgaagctttgaatcattca

SEQ ID NO: 25869 - DNA, 25 bp, Homo sapiens
ggagatggccttctggtaactgaat

SEQ ID NO: 25870 - DNA, 25 bp, Homo sapiens
taacaaaagcatgcagttctctgtg

SEQ ID NO: 25871 - DNA, 25 bp, Homo sapiens
taactgaatattaccttctgtagga

SEQ ID NO: 25872 - DNA, 25 bp, Homo sapiens
tcagtggtggagatggccttctggt

SEQ ID NO: 25873 - DNA, 25 bp, Homo sapiens
tctgatcacttttgagctctgaagc

SEQ ID NO: 25874 - DNA, 25 bp, Homo sapiens
tgtgaatgactctgtgctggcaaaa

SEQ ID NO: 25875 - DNA, 25 bp, Homo sapiens
ttatgctaatttgtgagttctgatc

SEQ ID NO: 25876 - DNA, 25 bp, Homo sapiens
agtttgcccaggatgtgggccgcat

SEQ ID NO: 25877 - DNA, 25 bp, Homo sapiens
caaggcagacgtgcagtccatcatc

SEQ ID NO: 25878 - DNA, 25 bp, Homo sapiens
caggagaagttgtcacctccctaca

SEQ ID NO: 25879 - DNA, 25 bp, Homo sapiens
ccttcggtgacaccaagttctctgc

SEQ ID NO: 25880 - DNA, 25 bp, Homo sapiens
gccaaccagcggaaatgtgagcgtg

SEQ ID NO: 25881 - DNA, 25 bp, Homo sapiens
gcggaaatgtgagcgtgtactgctg

SEQ ID NO: 25882 - DNA, 25 bp, Homo sapiens
gcttcttcgagacgcgcatgaacga

SEQ ID NO: 25883 - DNA, 25 bp, Homo sapiens
gttcctcacgatatggtttttactt

SEQ ID NO: 25884 - DNA, 25 bp, Homo sapiens
tgcagcgcttcttcgagacgcgcat

SEQ ID NO: 25885 - DNA, 25 bp, Homo sapiens
tgcccgcctccaggagaagttgtca

SEQ ID NO: 25886 - DNA, 25 bp, Homo sapiens
tgtgggccgcatgttcaagcaattc

SEQ ID NO: 25887 - DNA, 25 bp, Homo sapiens
agcgggagcagtatgccgatcgggc

SEQ ID NO: 25888 - DNA, 25 bp, Homo sapiens
aggcctcattgtgtgcagaaactgt

SEQ ID NO: 25889 - DNA, 25 bp, Homo sapiens
agggctacggttacgggcatgagag

SEQ ID NO: 25890 - DNA, 25 bp, Homo sapiens
cctcctgcggctgttggatttggga

SEQ ID NO: 25891 - DNA, 25 bp, Homo sapiens
cttgctaagttcagaccttctcttc

SEQ ID NO: 25892 - DNA, 25 bp, Homo sapiens
gaaattccgagctgcggttgtgcat

SEQ ID NO: 25893 - DNA, 25 bp, Homo sapiens
ggtgggatgtgtgtgggctgaaatt

SEQ ID NO: 25894 - DNA, 25 bp, Homo sapiens
gtggaccttaatttaccttgctaag

SEQ ID NO: 25895 - DNA, 25 bp, Homo sapiens
gttcagtccctcaggaaccgtggac

SEQ ID NO: 25896 - DNA, 25 bp, Homo sapiens
tgagaatacacccttcgtggtaccc

SEQ ID NO: 25897 - DNA, 25 bp, Homo sapiens
tggtgagagtctcactgctccaggg

SEQ ID NO: 25898 - DNA, 25 bp, Homo sapiens
atcctggagtggaccctgcgggtcc

SEQ ID NO: 25899 - DNA, 25 bp, Homo sapiens
cctaccaggccaccattgatggagt

SEQ ID NO: 25900 - DNA, 25 bp, Homo sapiens
ctacaaaactgacccgttcatcttc

SEQ ID NO: 25901 - DNA, 25 bp, Homo sapiens
gaccagacagtgctgttggtgactg

SEQ ID NO: 25902 - DNA, 25 bp, Homo sapiens
gagtcagatttttggggacatcagg

SEQ ID NO: 25903 - DNA, 25 bp, Homo sapiens
gcttcggggcagaggacgatgacct

SEQ ID NO: 25904 - DNA, 25 bp, Homo sapiens
ggcagaggacgatgacctgggaggc

SEQ ID NO: 25905 - DNA, 25 bp, Homo sapiens
ggctccaaaatcatccgaggtcctg

SEQ ID NO: 25906 - DNA, 25 bp, Homo sapiens
gggacatcaggacagaacgtgagtg

SEQ ID NO: 25907 - DNA, 25 bp, Homo sapiens
gtgacattttccgatacagcagcat

SEQ ID NO: 25908 - DNA, 25 bp, Homo sapiens
ttccgatacagcagcatggaggatc

SEQ ID NO: 25909 - DNA, 25 bp, Homo sapiens
aaaatggacttcttattcaaagcat

SEQ ID NO: 25910 - DNA, 25 bp, Homo sapiens
atacttctactcttaacaattacct

SEQ ID NO: 25911 - DNA, 25 bp, Homo sapiens
atagcttctagtgctgctacaatct

SEQ ID NO: 25912 - DNA, 25 bp, Homo sapiens
attacctaaggcttcctcaactgcc

SEQ ID NO: 25913 - DNA, 25 bp, Homo sapiens
cagcttcagccagggacaaaatccc

SEQ ID NO: 25914 - DNA, 25 bp, Homo sapiens
catgtgcacacagattattttttgg

SEQ ID NO: 25915 - DNA, 25 bp, Homo sapiens
gagtcattgtgtctgaaaactgcaa

SEQ ID NO: 25916 - DNA, 25 bp, Homo sapiens
gccccaaatctcttaatagcttcta

SEQ ID NO: 25917 - DNA, 25 bp, Homo sapiens
gctacaatctaagtcaggtcaccag

SEQ ID NO: 25918 - DNA, 25 bp, Homo sapiens
gtgtgttcctggtattcttttataa

SEQ ID NO: 25919 - DNA, 25 bp, Homo sapiens
tgagatccagcaaacaggttctgtt

SEQ ID NO: 25920 - DNA, 25 bp, Homo sapiens
attatttgcgtcatacatttcctgt

SEQ ID NO: 25921 - DNA, 25 bp, Homo sapiens
caagccatactgaggcggccaaggg

SEQ ID NO: 25922 - DNA, 25 bp, Homo sapiens
ccccatggaaatcactctcctgttg

SEQ ID NO: 25923 - DNA, 25 bp, Homo sapiens
cctgtcccatgtgcatcttatttaa

SEQ ID NO: 25924 - DNA, 25 bp, Homo sapiens
ctgagaggccatagcgccatcatgg

SEQ ID NO: 25925 - DNA, 25 bp, Homo sapiens
gaccaactgatcgcacacatgcttt

SEQ ID NO: 25926 - DNA, 25 bp, Homo sapiens
gagctctaggtgtttaggcagcgtg

SEQ ID NO: 25927 - DNA, 25 bp, Homo sapiens
gcaagagccagcgacgtggtggcca

SEQ ID NO: 25928 - DNA, 25 bp, Homo sapiens
tctcctgttgactatttccagagct

SEQ ID NO: 25929 - DNA, 25 bp, Homo sapiens
tggcaaactttctattgcctgtccc

SEQ ID NO: 25930 - DNA, 25 bp, Homo sapiens
tgtcctgattttgccacaacctgga

SEQ ID NO: 25931 - DNA, 25 bp, Homo sapiens
aaagaaagagtccatcagatttgtg

SEQ ID NO: 25932 - DNA, 25 bp, Homo sapiens
aagaacaagagctggacacattaaa

SEQ ID NO: 25933 - DNA, 25 bp, Homo sapiens
acaagatgaacaagtcggacttcct

SEQ ID NO: 25934 - DNA, 25 bp, Homo sapiens
actccgtaacagattctggaccaac

SEQ ID NO: 25935 - DNA, 25 bp, Homo sapiens
cttggtgctgaatctgctaaactga

SEQ ID NO: 25936 - DNA, 25 bp, Homo sapiens
gaaagatgaactctgcaggctaaga

SEQ ID NO: 25937 - DNA, 25 bp, Homo sapiens
gaataatcaggctcgctttatctta

SEQ ID NO: 25938 - DNA, 25 bp, Homo sapiens
gaccaaccttcaactatcttcttga

SEQ ID NO: 25939 - DNA, 25 bp, Homo sapiens
gagacttttttgaactcagacttaa

SEQ ID NO: 25940 - DNA, 25 bp, Homo sapiens
gatatgattcggatcctgtgaaggc

SEQ ID NO: 25941 - DNA, 25 bp, Homo sapiens
tggctcctaggaatgcttggtgctg

SEQ ID NO: 25942 - DNA, 25 bp, Homo sapiens
aagcttcaaactaggtattctggga

SEQ ID NO: 25943 - DNA, 25 bp, Homo sapiens
acttccttcatcacatcttatgttg

SEQ ID NO: 25944 - DNA, 25 bp, Homo sapiens
aggttttgtccatagcatcagttga

SEQ ID NO: 25945 - DNA, 25 bp, Homo sapiens
agtggctagtagtttcttcatttga

SEQ ID NO: 25946 - DNA, 25 bp, Homo sapiens
atccggtcagtaagaatgcccatcc

SEQ ID NO: 25947 - DNA, 25 bp, Homo sapiens
ctgtgcctttcaactccagaaacat

SEQ ID NO: 25948 - DNA, 25 bp, Homo sapiens
gaaattgtaagcatccggtcagtaa

SEQ ID NO: 25949 - DNA, 25 bp, Homo sapiens
gtaatttctatttgcactgtgcctt

SEQ ID NO: 25950 - DNA, 25 bp, Homo sapiens
gttaatgtcttaatccagcttgcaa

SEQ ID NO: 25951 - DNA, 25 bp, Homo sapiens
taagaatgcccatccagttttctat

SEQ ID NO: 25952 - DNA, 25 bp, Homo sapiens
ttcatgggagacttccttcatcaca

SEQ ID NO: 25953 - DNA, 25 bp, Homo sapiens
aacgactggtacagccaacgctatt

SEQ ID NO: 25954 - DNA, 25 bp, Homo sapiens
agagctatgaccactcaaggcacca

SEQ ID NO: 25955 - DNA, 25 bp, Homo sapiens
agcccagaggctcatcaggacttgt

SEQ ID NO: 25956 - DNA, 25 bp, Homo sapiens
cctctgcatacaaggccctgtttgc

SEQ ID NO: 25957 - DNA, 25 bp, Homo sapiens
gaagtttcttcagtccctgatcaga

SEQ ID NO: 25958 - DNA, 25 bp, Homo sapiens
gcataagtgacatcctcacgacctc

SEQ ID NO: 25959 - DNA, 25 bp, Homo sapiens
ggatttaccagttaccataccagaa

SEQ ID NO: 25960 - DNA, 25 bp, Homo sapiens
tgcccaggagctctccttgtgtaca

SEQ ID NO: 25961 - DNA, 25 bp, Homo sapiens
tgcccctaatcccagaggtagtgga

SEQ ID NO: 25962 - DNA, 25 bp, Homo sapiens
tgtgacaggcagctgaacctacggc

SEQ ID NO: 25963 - DNA, 25 bp, Homo sapiens
tgtgtacatcatcatggttccccag

SEQ ID NO: 25964 - DNA, 25 bp, Homo sapiens
atgccagtctgttgcatgcaggctt

SEQ ID NO: 25965 - DNA, 25 bp, Homo sapiens
attgcatcgggttccaagccaatgg

SEQ ID NO: 25966 - DNA, 25 bp, Homo sapiens
gagcgctcgtgaactggaatcaact

SEQ ID NO: 25967 - DNA, 25 bp, Homo sapiens
gaggtcagatttggagcttctcatt

SEQ ID NO: 25968 - DNA, 25 bp, Homo sapiens
ggaagcgttggttacagcagctgat

SEQ ID NO: 25969 - DNA, 25 bp, Homo sapiens
ggaattggggtctgctctaagctgc

SEQ ID NO: 25970 - DNA, 25 bp, Homo sapiens
ggagccacagtcttttttgctttgc

SEQ ID NO: 25971 - DNA, 25 bp, Homo sapiens
tagagactatgtcgctttcctgagc

SEQ ID NO: 25972 - DNA, 25 bp, Homo sapiens
tctagttcttgcacgctctttaaga

SEQ ID NO: 25973 - DNA, 25 bp, Homo sapiens
tgcaccaactccttagtgccgattc

SEQ ID NO: 25974 - DNA, 25 bp, Homo sapiens
ttcctgagctaccgagagcgctcgt

SEQ ID NO: 25975 - DNA, 25 bp, Homo sapiens
acctcctgagttggatgtcatcccc

SEQ ID NO: 25976 - DNA, 25 bp, Homo sapiens
agctcatcacagctgccagcttggt

SEQ ID NO: 25977 - DNA, 25 bp, Homo sapiens
atgagtgaggacgcctacacggtgc

SEQ ID NO: 25978 - DNA, 25 bp, Homo sapiens
caaaggcgagaccatggacacctcc

SEQ ID NO: 25979 - DNA, 25 bp, Homo sapiens
ccagcttggtgtgccggaaacgcaa

SEQ ID NO: 25980 - DNA, 25 bp, Homo sapiens
cccgctccacgcagtacatgaagga

SEQ ID NO: 25981 - DNA, 25 bp, Homo sapiens
gaaggagtaccaggacgccttcctc

SEQ ID NO: 25982 - DNA, 25 bp, Homo sapiens
gatcatggccaccaaccgtggcatc

SEQ ID NO: 25983 - DNA, 25 bp, Homo sapiens
gatgacatcaagcgggtctactcac

SEQ ID NO: 25984 - DNA, 25 bp, Homo sapiens
ggagtgctgttcatcgacgaggtcc

SEQ ID NO: 25985 - DNA, 25 bp, Homo sapiens
tgacccgcatcgggctggagacgtc

SEQ ID NO: 25986 - DNA, 25 bp, Homo sapiens
aagaatcttcttgatagctctccca

SEQ ID NO: 25987 - DNA, 25 bp, Homo sapiens
agagcaagtgtcccatgaatgtgat

SEQ ID NO: 25988 - DNA, 25 bp, Homo sapiens
atcagtggccctcataactggagta

SEQ ID NO: 25989 - DNA, 25 bp, Homo sapiens
atgtgatttcctgggttctcactgt

SEQ ID NO: 25990 - DNA, 25 bp, Homo sapiens
attcccattcactttgattttctac

SEQ ID NO: 25991 - DNA, 25 bp, Homo sapiens
gaggttgaagtgtctttggcccatt

SEQ ID NO: 25992 - DNA, 25 bp, Homo sapiens
gcagctggtaggatgtctggtgccc

SEQ ID NO: 25993 - DNA, 25 bp, Homo sapiens
gtagagttcctggttgcttttcata

SEQ ID NO: 25994 - DNA, 25 bp, Homo sapiens
tcttttatgttcacaccaccacatt

SEQ ID NO: 25995 - DNA, 25 bp, Homo sapiens
tgtctggtgcccaatcccaggaagt

SEQ ID NO: 25996 - DNA, 25 bp, Homo sapiens
tgtctttgcaccacgtctaggaaga

SEQ ID NO: 25997 - DNA, 25 bp, Homo sapiens
acgaaaatattgttcatactgatca

SEQ ID NO: 25998 - DNA, 25 bp, Homo sapiens
acttactaagtgtcaacagccctta

SEQ ID NO: 25999 - DNA, 25 bp, Homo sapiens
agtgtcaacagcccttacaaacatt

SEQ ID NO: 26000 - DNA, 25 bp, Homo sapiens
gaagaaattcttcctggatgaaatt

SEQ ID NO: 26001 - DNA, 25 bp, Homo sapiens
gacttataaaatacctaactacagg

SEQ ID NO: 26002 - DNA, 25 bp, Homo sapiens
gcatgagctactttcatctaaacct

SEQ ID NO: 26003 - DNA, 25 bp, Homo sapiens
gctaaaaacaatttgcacagcacta

SEQ ID NO: 26004 - DNA, 25 bp, Homo sapiens
gctactttcatctaaacctgtaaaa

SEQ ID NO: 26005 - DNA, 25 bp, Homo sapiens
gtaaatggtttcaaatggtcagcgt

SEQ ID NO: 26006 - DNA, 25 bp, Homo sapiens
gtttcaaatggtcagcgttgtttaa

SEQ ID NO: 26007 - DNA, 25 bp, Homo sapiens
tgcacagcactaaagcatgagctac

SEQ ID NO: 26008 - DNA, 25 bp, Homo sapiens
agtgacgaggcaactgctgcgaggc

SEQ ID NO: 26009 - DNA, 25 bp, Homo sapiens
agtgagttacatctcattcaatctc

SEQ ID NO: 26010 - DNA, 25 bp, Homo sapiens
atatggccggggtgacattccggaa

SEQ ID NO: 26011 - DNA, 25 bp, Homo sapiens
caccaaatacccgtacgtgtgccat

SEQ ID NO: 26012 - DNA, 25 bp, Homo sapiens
cagtgatgacgtgttgccttggaga

SEQ ID NO: 26013 - DNA, 25 bp, Homo sapiens
gaatgcgctaagctcatcatccagg

SEQ ID NO: 26014 - DNA, 25 bp, Homo sapiens
gaggttgctaatgcctttcatcttg

SEQ ID NO: 26015 - DNA, 25 bp, Homo sapiens
gcagaccgagtcaaaagcttcagtg

SEQ ID NO: 26016 - DNA, 25 bp, Homo sapiens
gcgaggctcctgtttaatatggccg

SEQ ID NO: 26017 - DNA, 25 bp, Homo sapiens
ggcgcctgcatcgtgaattcagaaa

SEQ ID NO: 26018 - DNA, 25 bp, Homo sapiens
taagctcatcatccaggcaggtata

SEQ ID NO: 26019 - DNA, 25 bp, Homo sapiens
acttacttcttgccagttatctatt

SEQ ID NO: 26020 - DNA, 25 bp, Homo sapiens
cgccccacacattggatactgttgt

SEQ ID NO: 26021 - DNA, 25 bp, Homo sapiens
gagtcagatctaagctccaggcacg

SEQ ID NO: 26022 - DNA, 25 bp, Homo sapiens
gattaaccctcaaagttctcttcat

SEQ ID NO: 26023 - DNA, 25 bp, Homo sapiens
ggcacgcctgaagatgtgttgctac

SEQ ID NO: 26024 - DNA, 25 bp, Homo sapiens
gtgagcgcttagacctttttctatt

SEQ ID NO: 26025 - DNA, 25 bp, Homo sapiens
tactctgacatcccgagtttctgtc

SEQ ID NO: 26026 - DNA, 25 bp, Homo sapiens
tcacgataatttctcccgttttcca

SEQ ID NO: 26027 - DNA, 25 bp, Homo sapiens
tgagcattgtatttctcgcatccct

SEQ ID NO: 26028 - DNA, 25 bp, Homo sapiens
tgtccacacattgcatgcacagcgc

SEQ ID NO: 26029 - DNA, 25 bp, Homo sapiens
ttctcttcataactgccttgacatt

SEQ ID NO: 26030 - DNA, 25 bp, Homo sapiens
aaacatgatatatcagcttttgcct

SEQ ID NO: 26031 - DNA, 25 bp, Homo sapiens
aaacgcttggagtgcttctgaatat

SEQ ID NO: 26032 - DNA, 25 bp, Homo sapiens
aaacttccctctctagacagtagat

SEQ ID NO: 26033 - DNA, 25 bp, Homo sapiens
acagaagttccatttaagggcaagt

SEQ ID NO: 26034 - DNA, 25 bp, Homo sapiens
gagaatccaactttattacgattag

SEQ ID NO: 26035 - DNA, 25 bp, Homo sapiens
gatggttacatatactagggaaatt

SEQ ID NO: 26036 - DNA, 25 bp, Homo sapiens
gcaagtttccccgtagatgtatcaa

SEQ ID NO: 26037 - DNA, 25 bp, Homo sapiens
gcctcccagcttcttataagactca

SEQ ID NO: 26038 - DNA, 25 bp, Homo sapiens
gtagataccacctactgatggttac

SEQ ID NO: 26039 - DNA, 25 bp, Homo sapiens
tcaaacttccatatttgccttggga

SEQ ID NO: 26040 - DNA, 25 bp, Homo sapiens
tgcctttcaatttatcaatctctta

SEQ ID NO: 26041 - DNA, 25 bp, Homo sapiens
aaacagctgctgatgctacagtccc

SEQ ID NO: 26042 - DNA, 25 bp, Homo sapiens
acaaactggcttacctggagggcat

SEQ ID NO: 26043 - DNA, 25 bp, Homo sapiens
actttaagatcatttaccgccgcta

SEQ ID NO: 26044 - DNA, 25 bp, Homo sapiens
caagggaggagacttcaccccactt

SEQ ID NO: 26045 - DNA, 25 bp, Homo sapiens
gaaatccgagagaccagccagacga

SEQ ID NO: 26046 - DNA, 25 bp, Homo sapiens
gaagggacccagctgggtctgggcc

SEQ ID NO: 26047 - DNA, 25 bp, Homo sapiens
gccgttgtcgtgtgattccataagc

SEQ ID NO: 26048 - DNA, 25 bp, Homo sapiens
ggagggcattcacaacttcgtggag

SEQ ID NO: 26049 - DNA, 25 bp, Homo sapiens
ggtcgtggacgagatgttcctggct

SEQ ID NO: 26050 - DNA, 25 bp, Homo sapiens
tccttccctcaactgcctaggagga

SEQ ID NO: 26051 - DNA, 25 bp, Homo sapiens
tggacctggtgttcaacttctacaa

SEQ ID NO: 26052 - DNA, 25 bp, Homo sapiens
aaactgttacagtcaagaccattaa

SEQ ID NO: 26053 - DNA, 25 bp, Homo sapiens
aatcctgctgatccagttgtactta

SEQ ID NO: 26054 - DNA, 25 bp, Homo sapiens
accattaatggtcttctccaaaata

SEQ ID NO: 26055 - DNA, 25 bp, Homo sapiens
agcatttgaagctcgtgatcgaaac

SEQ ID NO: 26056 - DNA, 25 bp, Homo sapiens
cactttctgtgcaagtaatcctgct

SEQ ID NO: 26057 - DNA, 25 bp, Homo sapiens
gaatccatcaacagcatcaagtcca

SEQ ID NO: 26058 - DNA, 25 bp, Homo sapiens
gagtcaatttctggtctatggttaa

SEQ ID NO: 26059 - DNA, 25 bp, Homo sapiens
gccatattaataactgcattttcct

SEQ ID NO: 26060 - DNA, 25 bp, Homo sapiens
ggaagacatcctggaatccatcaac

SEQ ID NO: 26061 - DNA, 25 bp, Homo sapiens
ggtcatggtggtggtgtcagccatt

SEQ ID NO: 26062 - DNA, 25 bp, Homo sapiens
tggtgtcagccattcaagtttatat

SEQ ID NO: 26063 - DNA, 25 bp, Homo sapiens
aacttgacagtaactttgtagactt

SEQ ID NO: 26064 - DNA, 25 bp, Homo sapiens
aattctgagcccatatttcacttac

SEQ ID NO: 26065 - DNA, 25 bp, Homo sapiens
atgtctcttaagcaggtttggtttt

SEQ ID NO: 26066 - DNA, 25 bp, Homo sapiens
attgtacacaatctcatttcatatg

SEQ ID NO: 26067 - DNA, 25 bp, Homo sapiens
ggtagcctttggtctattgtacaca

SEQ ID NO: 26068 - DNA, 25 bp, Homo sapiens
gtaccactttacttgaattacatta

SEQ ID NO: 26069 - DNA, 25 bp, Homo sapiens
gtatttgaatactgtcaacttgaca

SEQ ID NO: 26070 - DNA, 25 bp, Homo sapiens
tattctcctattttacagctacaag

SEQ ID NO: 26071 - DNA, 25 bp, Homo sapiens
tgactgttggtctctaggtagcctt

SEQ ID NO: 26072 - DNA, 25 bp, Homo sapiens
tgatgtgttttctttagtaccactt

SEQ ID NO: 26073 - DNA, 25 bp, Homo sapiens
ttttgacattcatattctcctattt

SEQ ID NO: 26074 - DNA, 25 bp, Homo sapiens
agggcctgaagtacacattctctgt

SEQ ID NO: 26075 - DNA, 25 bp, Homo sapiens
atcgcccctgagatcctacagggcc

SEQ ID NO: 26076 - DNA, 25 bp, Homo sapiens
atggaccagtctgcattcgctggct

SEQ ID NO: 26077 - DNA, 25 bp, Homo sapiens
ccatccgtgtggacacgccacatta

SEQ ID NO: 26078 - DNA, 25 bp, Homo sapiens
cccgctggatcaccaaggagtccaa

SEQ ID NO: 26079 - DNA, 25 bp, Homo sapiens
ctcctacagcgacaagaacctcatc

SEQ ID NO: 26080 - DNA, 25 bp, Homo sapiens
gaaaagcggaggttggagccaccct

SEQ ID NO: 26081 - DNA, 25 bp, Homo sapiens
gagttcctgaacgagaaggcgcgcc

SEQ ID NO: 26082 - DNA, 25 bp, Homo sapiens
ggatgaactcttcgagtccatccgt

SEQ ID NO: 26083 - DNA, 25 bp, Homo sapiens
gtacgagatgctcattggccagtcc

SEQ ID NO: 26084 - DNA, 25 bp, Homo sapiens
tcatcgactccatggaccagtctgc

SEQ ID NO: 26085 - DNA, 25 bp, Homo sapiens
caggggctggccgaggaaaagctgc

SEQ ID NO: 26086 - DNA, 25 bp, Homo sapiens
catgaactgccagatgtccaacatc

SEQ ID NO: 26087 - DNA, 25 bp, Homo sapiens
ctgccattctcaaggcccaagtggc

SEQ ID NO: 26088 - DNA, 25 bp, Homo sapiens
gagtgggtgcttgtgcatatatcta

SEQ ID NO: 26089 - DNA, 25 bp, Homo sapiens
gccatctttctctttagatcagggg

SEQ ID NO: 26090 - DNA, 25 bp, Homo sapiens
gcccaagtggccgcaagaggaagag

SEQ ID NO: 26091 - DNA, 25 bp, Homo sapiens
gcctgacatgctgaagaacgcaccc

SEQ ID NO: 26092 - DNA, 25 bp, Homo sapiens
ggagcaggtatacatccgtggcagc

SEQ ID NO: 26093 - DNA, 25 bp, Homo sapiens
ggtatatcgggggaagctcattgaa

SEQ ID NO: 26094 - DNA, 25 bp, Homo sapiens
gtggcagcaaaatccgctttctgat

SEQ ID NO: 26095 - DNA, 25 bp, Homo sapiens
tctaggtatcttttgccatctttct

SEQ ID NO: 26096 - DNA, 25 bp, Homo sapiens
acatcaatcgtgtgtcctgatttgg

SEQ ID NO: 26097 - DNA, 25 bp, Homo sapiens
agggctggcagtcttacagaggctg

SEQ ID NO: 26098 - DNA, 25 bp, Homo sapiens
cctggccagggacatctgccaaagg

SEQ ID NO: 26099 - DNA, 25 bp, Homo sapiens
gagaggccagagggaccatagtgtt

SEQ ID NO: 26100 - DNA, 25 bp, Homo sapiens
ggcattagggccttcaagggctggc

SEQ ID NO: 26101 - DNA, 25 bp, Homo sapiens
ggtattctcatggcctgattttttt

SEQ ID NO: 26102 - DNA, 25 bp, Homo sapiens
gtcaggggtgcgtagaggttggggg

SEQ ID NO: 26103 - DNA, 25 bp, Homo sapiens
gttctcggagaaccaagttgctaca

SEQ ID NO: 26104 - DNA, 25 bp, Homo sapiens
gttgctacacaggaagttctccaag

SEQ ID NO: 26105 - DNA, 25 bp, Homo sapiens
tctacccctaactccaggtcagggg

SEQ ID NO: 26106 - DNA, 25 bp, Homo sapiens
tgggcactgtctgaccatgttgcat

SEQ ID NO: 26107 - DNA, 25 bp, Homo sapiens
aatattgtttatagccttccctgta

SEQ ID NO: 26108 - DNA, 25 bp, Homo sapiens
agagatgtgtgctctcacagctttg

SEQ ID NO: 26109 - DNA, 25 bp, Homo sapiens
agcatatgccgcgagctgggcttta

SEQ ID NO: 26110 - DNA, 25 bp, Homo sapiens
ccagctgtgttggattggggcccac

SEQ ID NO: 26111 - DNA, 25 bp, Homo sapiens
ccccttttcgtagtgacaccagctg

SEQ ID NO: 26112 - DNA, 25 bp, Homo sapiens
gctttgcaggcgggggtctgagatc

SEQ ID NO: 26113 - DNA, 25 bp, Homo sapiens
ggccgtgaggggaatctgctcaggc

SEQ ID NO: 26114 - DNA, 25 bp, Homo sapiens
ggggctgcggtgacagcatatgccg

SEQ ID NO: 26115 - DNA, 25 bp, Homo sapiens
gtattttcagttccttggtgtgtgg

SEQ ID NO: 26116 - DNA, 25 bp, Homo sapiens
tccagcatggcctaatcttaactaa

SEQ ID NO: 26117 - DNA, 25 bp, Homo sapiens
tgagcctgtgcgttttgcatactgg

SEQ ID NO: 26118 - DNA, 25 bp, Homo sapiens
acaatggaatcttccctctgttctc

SEQ ID NO: 26119 - DNA, 25 bp, Homo sapiens
agaaagaggcgctgctcactgtttt

SEQ ID NO: 26120 - DNA, 25 bp, Homo sapiens
caatgcctttaagccaagtcaccct

SEQ ID NO: 26121 - DNA, 25 bp, Homo sapiens
ccaagtcaccctgttgcctatggga

SEQ ID NO: 26122 - DNA, 25 bp, Homo sapiens
ctccacccagagatggcttttccaa

SEQ ID NO: 26123 - DNA, 25 bp, Homo sapiens
ctctgataacctacttgcttactca

SEQ ID NO: 26124 - DNA, 25 bp, Homo sapiens
gatttggcaagctcaaccacatgct

SEQ ID NO: 26125 - DNA, 25 bp, Homo sapiens
ggaaaaggcttaccaggctgctatg

SEQ ID NO: 26126 - DNA, 25 bp, Homo sapiens
ggctgctatggtcaactcttcagaa

SEQ ID NO: 26127 - DNA, 25 bp, Homo sapiens
gttgtcaccaacagtctttctgcaa

SEQ ID NO: 26128 - DNA, 25 bp, Homo sapiens
taatcaacgaacttctcttctccac

SEQ ID NO: 26129 - DNA, 25 bp, Homo sapiens
aaaccatggcaacgaaagtagaatg

SEQ ID NO: 26130 - DNA, 25 bp, Homo sapiens
aaactcgcagcagatatcagtggga

SEQ ID NO: 26131 - DNA, 25 bp, Homo sapiens
agacagaaaacctgccatggggctg

SEQ ID NO: 26132 - DNA, 25 bp, Homo sapiens
agccagaggccctggccaaagatag

SEQ ID NO: 26133 - DNA, 25 bp, Homo sapiens
aggaagaaagagaactctccataga

SEQ ID NO: 26134 - DNA, 25 bp, Homo sapiens
gaatgtaatttatagatgcgtgtat

SEQ ID NO: 26135 - DNA, 25 bp, Homo sapiens
gcctctctcctaggatacagaaacc

SEQ ID NO: 26136 - DNA, 25 bp, Homo sapiens
ggacagacagaaaacctgccatggg

SEQ ID NO: 26137 - DNA, 25 bp, Homo sapiens
gtagaatgtaaaactcgcagcagat

SEQ ID NO: 26138 - DNA, 25 bp, Homo sapiens
tcgcctctctcctaggatacagaaa

SEQ ID NO: 26139 - DNA, 25 bp, Homo sapiens
tgcagaaagctcttaggacagacag

SEQ ID NO: 26140 - DNA, 25 bp, Homo sapiens
aggacgatggggcatgacctcagtc

SEQ ID NO: 26141 - DNA, 25 bp, Homo sapiens
ctgctcaggtgctatgtcccaagag

SEQ ID NO: 26142 - DNA, 25 bp, Homo sapiens
gaagggctggaaacaagtgacccca

SEQ ID NO: 26143 - DNA, 25 bp, Homo sapiens
gagtctgtcttgagatctgattttt

SEQ ID NO: 26144 - DNA, 25 bp, Homo sapiens
gctgaacttggagagggggccggac

SEQ ID NO: 26145 - DNA, 25 bp, Homo sapiens
gtagggcagacatgccttggtgccg

SEQ ID NO: 26146 - DNA, 25 bp, Homo sapiens
gtctcccttcttgggtagggcagac

SEQ ID NO: 26147 - DNA, 25 bp, Homo sapiens
tctacacggactgaggtgcctgctc

SEQ ID NO: 26148 - DNA, 25 bp, Homo sapiens
tctggttatttatttccttagtgcc

SEQ ID NO: 26149 - DNA, 25 bp, Homo sapiens
tgacctcagtcaggcactggctgaa

SEQ ID NO: 26150 - DNA, 25 bp, Homo sapiens
tgtggggaacaggtcttggggtcat

SEQ ID NO: 26151 - DNA, 25 bp, Homo sapiens
aagtattttccagcagtccaaagat

SEQ ID NO: 26152 - DNA, 25 bp, Homo sapiens
aatacgatttgagacctgaattggt

SEQ ID NO: 26153 - DNA, 25 bp, Homo sapiens
actaactttgtgctatctttatgaa

SEQ ID NO: 26154 - DNA, 25 bp, Homo sapiens
actactgcacttgagcatgaatggg

SEQ ID NO: 26155 - DNA, 25 bp, Homo sapiens
atgggtagtagccaaactcacaaat

SEQ ID NO: 26156 - DNA, 25 bp, Homo sapiens
cccctcacaatgcagctgcatgggt

SEQ ID NO: 26157 - DNA, 25 bp, Homo sapiens
gctgcatgggtttttagtgcctact

SEQ ID NO: 26158 - DNA, 25 bp, Homo sapiens
ggagtgatgaacctgcttataccta

SEQ ID NO: 26159 - DNA, 25 bp, Homo sapiens
taagggcaggagcaagcccctcaca

SEQ ID NO: 26160 - DNA, 25 bp, Homo sapiens
tccagtgcatcacagcatattttgt

SEQ ID NO: 26161 - DNA, 25 bp, Homo sapiens
tggtctttggtttccagtgcatcac

SEQ ID NO: 26162 - DNA, 25 bp, Homo sapiens
aaactggtcataaaggcactctgtg

SEQ ID NO: 26163 - DNA, 25 bp, Homo sapiens
actgaccatacatttttcttagccc

SEQ ID NO: 26164 - DNA, 25 bp, Homo sapiens
ccttccagagtcctggctgattggt

SEQ ID NO: 26165 - DNA, 25 bp, Homo sapiens
gaatgacaattcccctaaccattcc

SEQ ID NO: 26166 - DNA, 25 bp, Homo sapiens
gacatttttacataccgagcctgag

SEQ ID NO: 26167 - DNA, 25 bp, Homo sapiens
ggacttctcatttttggagctttcc

SEQ ID NO: 26168 - DNA, 25 bp, Homo sapiens
gggactgacatcttaagctctcacc

SEQ ID NO: 26169 - DNA, 25 bp, Homo sapiens
tacactactgtgtttcactgaccat

SEQ ID NO: 26170 - DNA, 25 bp, Homo sapiens
tgattggtgttcgctgttcatctga

SEQ ID NO: 26171 - DNA, 25 bp, Homo sapiens
ttcatctgagcccccaaaagcatta

SEQ ID NO: 26172 - DNA, 25 bp, Homo sapiens
ttcttagcccctcaagtaatatagc

SEQ ID NO: 26173 - DNA, 25 bp, Homo sapiens
actgcgaaccaaaggttgcaccaac

SEQ ID NO: 26174 - DNA, 25 bp, Homo sapiens
caacaaccgcttggaatgctgcaac

SEQ ID NO: 26175 - DNA, 25 bp, Homo sapiens
ctcagtgaaggcccatgaagggaat

SEQ ID NO: 26176 - DNA, 25 bp, Homo sapiens
ctcttcttccattaggatgctacaa

SEQ ID NO: 26177 - DNA, 25 bp, Homo sapiens
gaacgtattcattacagtttataaa

SEQ ID NO: 26178 - DNA, 25 bp, Homo sapiens
gatgtaaattggagtcaaccaggtg

SEQ ID NO: 26179 - DNA, 25 bp, Homo sapiens
ggggatctaactgcgaaccaaaggt

SEQ ID NO: 26180 - DNA, 25 bp, Homo sapiens
gttgcaccaacaaccgcttggaatg

SEQ ID NO: 26181 - DNA, 25 bp, Homo sapiens
taactgggggatctaactgcgaacc

SEQ ID NO: 26182 - DNA, 25 bp, Homo sapiens
tgaagggaattggggactagtttat

SEQ ID NO: 26183 - DNA, 25 bp, Homo sapiens
ttggaatgctgcaacaatggcaccc

SEQ ID NO: 26184 - DNA, 25 bp, Homo sapiens
ctcaagaggaatctgtttctctgct

SEQ ID NO: 26185 - DNA, 25 bp, Homo sapiens
gaactgtacattgtgagctctggtt

SEQ ID NO: 26186 - DNA, 25 bp, Homo sapiens
gaccgttctattgtgtggatgacca

SEQ ID NO: 26187 - DNA, 25 bp, Homo sapiens
gagacattgctctatgtctgccttc

SEQ ID NO: 26188 - DNA, 25 bp, Homo sapiens
ggagctcagtaacataactgcttct

SEQ ID NO: 26189 - DNA, 25 bp, Homo sapiens
ggctcagcatagggtcactttgcca

SEQ ID NO: 26190 - DNA, 25 bp, Homo sapiens
gggatattgccttatttgtctgtaa

SEQ ID NO: 26191 - DNA, 25 bp, Homo sapiens
gtccaggagctaatctgaccgttct

SEQ ID NO: 26192 - DNA, 25 bp, Homo sapiens
taaactttagacttcccactgttct

SEQ ID NO: 26193 - DNA, 25 bp, Homo sapiens
tccattgctcccggggactcaagag

SEQ ID NO: 26194 - DNA, 25 bp, Homo sapiens
tcccatctggctcagcatagggtca

SEQ ID NO: 26195 - DNA, 25 bp, Homo sapiens
aatcatgtccatacactttgttgca

SEQ ID NO: 26196 - DNA, 25 bp, Homo sapiens
actgtgcgtcttggtgtaatttgaa

SEQ ID NO: 26197 - DNA, 25 bp, Homo sapiens
agactagcaatctcttcattattct

SEQ ID NO: 26198 - DNA, 25 bp, Homo sapiens
atcaccatgtaagcactctggatga

SEQ ID NO: 26199 - DNA, 25 bp, Homo sapiens
cttctcttagattcttaattcatga

SEQ ID NO: 26200 - DNA, 25 bp, Homo sapiens
ggcaatattaacctaatcaccatgt

SEQ ID NO: 26201 - DNA, 25 bp, Homo sapiens
gggtaaataaaccactgtgcgtctt

SEQ ID NO: 26202 - DNA, 25 bp, Homo sapiens
gttttatggttacttcttctcttag

SEQ ID NO: 26203 - DNA, 25 bp, Homo sapiens
taaaacggtgctgtgagggagggga

SEQ ID NO: 26204 - DNA, 25 bp, Homo sapiens
tgaagattgccccatctagactagc

SEQ ID NO: 26205 - DNA, 25 bp, Homo sapiens
tgtactgttcggaaggggttcctca

SEQ ID NO: 26206 - DNA, 25 bp, Homo sapiens
accggcacatgcggttactgtgggc

SEQ ID NO: 26207 - DNA, 25 bp, Homo sapiens
agcagcccgtgagcgaggtggagac

SEQ ID NO: 26208 - DNA, 25 bp, Homo sapiens
ctgtgagcatttccgcggggaagct

SEQ ID NO: 26209 - DNA, 25 bp, Homo sapiens
gtctcgccgaccggggagaaggtca

SEQ ID NO: 26210 - DNA, 25 bp, Homo sapiens
gtgaagctcgctggttctgtgcgaa

SEQ ID NO: 26211 - DNA, 25 bp, Homo sapiens
gtgcgaagggtattcctggtgctga

SEQ ID NO: 26212 - DNA, 25 bp, Homo sapiens
gtggagactcgggtgatagcgtgcg

SEQ ID NO: 26213 - DNA, 25 bp, Homo sapiens
gttactgtgggctccagttcagaca

SEQ ID NO: 26214 - DNA, 25 bp, Homo sapiens
taaagggtgttgctgtcatggctga

SEQ ID NO: 26215 - DNA, 25 bp, Homo sapiens
tcacgcacactggccaggtttatga

SEQ ID NO: 26216 - DNA, 25 bp, Homo sapiens
tgctgaaccggtgtggcgaggcggc

SEQ ID NO: 26217 - DNA, 25 bp, Homo sapiens
aagatgccttaatccattccttgag

SEQ ID NO: 26218 - DNA, 25 bp, Homo sapiens
agcctcatacctacatcagacaaaa

SEQ ID NO: 26219 - DNA, 25 bp, Homo sapiens
aggacctcaccaaaagatccagcct

SEQ ID NO: 26220 - DNA, 25 bp, Homo sapiens
caaaatatcgccgttgttccttctg

SEQ ID NO: 26221 - DNA, 25 bp, Homo sapiens
caacgtctaactggacttcccaaga

SEQ ID NO: 26222 - DNA, 25 bp, Homo sapiens
ccttctgcttctgagttgcacatta

SEQ ID NO: 26223 - DNA, 25 bp, Homo sapiens
gataaatggtaccagcgtcctctta

SEQ ID NO: 26224 - DNA, 25 bp, Homo sapiens
gcttccagactctttgcgttggaga

SEQ ID NO: 26225 - DNA, 25 bp, Homo sapiens
gggattgctttcatctaattctggc

SEQ ID NO: 26226 - DNA, 25 bp, Homo sapiens
gttaggatcttcaagtcccatcata

SEQ ID NO: 26227 - DNA, 25 bp, Homo sapiens
tttgctttggaaacacccactcact

SEQ ID NO: 26228 - DNA, 25 bp, Homo sapiens
agcacacactactactgatggcctt

SEQ ID NO: 26229 - DNA, 25 bp, Homo sapiens
agccaggaactcagggactcagagt

SEQ ID NO: 26230 - DNA, 25 bp, Homo sapiens
atgttgcacagtttttattgctccc

SEQ ID NO: 26231 - DNA, 25 bp, Homo sapiens
cagcaatggcggagcagagtgagtg

SEQ ID NO: 26232 - DNA, 25 bp, Homo sapiens
cagcctcagcaatggcggagcagag

SEQ ID NO: 26233 - DNA, 25 bp, Homo sapiens
ctgtctgggtcctttggtcaatgtt

SEQ ID NO: 26234 - DNA, 25 bp, Homo sapiens
gatgagagagcggcaactggcgttc

SEQ ID NO: 26235 - DNA, 25 bp, Homo sapiens
ggaactcagggactcagagtgatgg

SEQ ID NO: 26236 - DNA, 25 bp, Homo sapiens
gtgcagcctcagcaatggcggagca

SEQ ID NO: 26237 - DNA, 25 bp, Homo sapiens
tctgtctgggtcctttggtcaatgt

SEQ ID NO: 26238 - DNA, 25 bp, Homo sapiens
ttgcacagtttttattgctcccatc

SEQ ID NO: 26239 - DNA, 25 bp, Homo sapiens
agttactcaagcagttactccctac

SEQ ID NO: 26240 - DNA, 25 bp, Homo sapiens
atttttggtttatatgccctcaagt

SEQ ID NO: 26241 - DNA, 25 bp, Homo sapiens
gaaatacctttgtagttactcaagc

SEQ ID NO: 26242 - DNA, 25 bp, Homo sapiens
gcagccatagtttgggtatttttgg

SEQ ID NO: 26243 - DNA, 25 bp, Homo sapiens
ggggcccggagatagatgactttgc

SEQ ID NO: 26244 - DNA, 25 bp, Homo sapiens
gggttccagtgattaatctccctga

SEQ ID NO: 26245 - DNA, 25 bp, Homo sapiens
gttactccctacactgatgcaagga

SEQ ID NO: 26246 - DNA, 25 bp, Homo sapiens
gttcaactacatgttctgggggccc

SEQ ID NO: 26247 - DNA, 25 bp, Homo sapiens
taaagtttaagtgtgcagccatagt

SEQ ID NO: 26248 - DNA, 25 bp, Homo sapiens
tctccctgaacggtgatggcatctg

SEQ ID NO: 26249 - DNA, 25 bp, Homo sapiens
tgaaccaaattgcactgaagttttt

SEQ ID NO: 26250 - DNA, 25 bp, Homo sapiens
aacacgattcgcaacgttctgttat

SEQ ID NO: 26251 - DNA, 25 bp, Homo sapiens
accgagacaaacccttgatgctcct

SEQ ID NO: 26252 - DNA, 25 bp, Homo sapiens
actatagaactcttcattgtcagca

SEQ ID NO: 26253 - DNA, 25 bp, Homo sapiens
ctcagggcgtgcactgtgaggctgg

SEQ ID NO: 26254 - DNA, 25 bp, Homo sapiens
cttcaggttgtcttgtttctgtata

SEQ ID NO: 26255 - DNA, 25 bp, Homo sapiens
gaacctcctgtacttaaacacgatt

SEQ ID NO: 26256 - DNA, 25 bp, Homo sapiens
gtcaatttctgactcacagcagtga

SEQ ID NO: 26257 - DNA, 25 bp, Homo sapiens
gtgacatagcattctgctgccatct

SEQ ID NO: 26258 - DNA, 25 bp, Homo sapiens
tctgctgccatcttagctgtggaca

SEQ ID NO: 26259 - DNA, 25 bp, Homo sapiens
tgcagggggcatccatttagcttca

SEQ ID NO: 26260 - DNA, 25 bp, Homo sapiens
tggacctgttgactctgcagggggc

SEQ ID NO: 26261 - DNA, 25 bp, Homo sapiens
aactcaatccagattttctttttgt

SEQ ID NO: 26262 - DNA, 25 bp, Homo sapiens
aagagatttatccgacaggcagaaa

SEQ ID NO: 26263 - DNA, 25 bp, Homo sapiens
gaaatgaatcattatgctttgttta

SEQ ID NO: 26264 - DNA, 25 bp, Homo sapiens
gaactgtggtagtggagatactttt

SEQ ID NO: 26265 - DNA, 25 bp, Homo sapiens
gaggattggatgcaagcttttttaa

SEQ ID NO: 26266 - DNA, 25 bp, Homo sapiens
gatagctgtccttgaagaattcatg

SEQ ID NO: 26267 - DNA, 25 bp, Homo sapiens
gcaatgcaggaagtaaccggttttg

SEQ ID NO: 26268 - DNA, 25 bp, Homo sapiens
gccaaaaatgtgatagctgtccttg

SEQ ID NO: 26269 - DNA, 25 bp, Homo sapiens
gtaaccggttttgtgaggattggat

SEQ ID NO: 26270 - DNA, 25 bp, Homo sapiens
ttaaactaaaggccatacaagacac

SEQ ID NO: 26271 - DNA, 25 bp, Homo sapiens
tttttccgacaagtactggagaact

SEQ ID NO: 26272 - DNA, 25 bp, Homo sapiens
agaagactctgtactcagccattcg

SEQ ID NO: 26273 - DNA, 25 bp, Homo sapiens
aggacatcttggctgtgagaccacc

SEQ ID NO: 26274 - DNA, 25 bp, Homo sapiens
atcaggagcgtctgggcaagcagct

SEQ ID NO: 26275 - DNA, 25 bp, Homo sapiens
gaaattcgtcaaaggctctacagag

SEQ ID NO: 26276 - DNA, 25 bp, Homo sapiens
gagtgaggtgctggaatctttcccc

SEQ ID NO: 26277 - DNA, 25 bp, Homo sapiens
gcaagaacatgacccctgagagtga

SEQ ID NO: 26278 - DNA, 25 bp, Homo sapiens
gcccctccgcagaataactaagaaa

SEQ ID NO: 26279 - DNA, 25 bp, Homo sapiens
ggaaggtgcctatggtggtcttgca

SEQ ID NO: 26280 - DNA, 25 bp, Homo sapiens
ggcaagcagctcaagttacgtgcag

SEQ ID NO: 26281 - DNA, 25 bp, Homo sapiens
tgaagctgggggcatcctgttcaaa

SEQ ID NO: 26282 - DNA, 25 bp, Homo sapiens
tgagaccaccgcaaatcaagtccct

SEQ ID NO: 26283 - DNA, 25 bp, Homo sapiens
aaatgcacacattactccaggtgga

SEQ ID NO: 26284 - DNA, 25 bp, Homo sapiens
ataggtcagttactggtctctttct

SEQ ID NO: 26285 - DNA, 25 bp, Homo sapiens
atcaagacatggtcccatttgcagg

SEQ ID NO: 26286 - DNA, 25 bp, Homo sapiens
catcccttgtaacccggtatgggcg

SEQ ID NO: 26287 - DNA, 25 bp, Homo sapiens
ctgcattgctgggatgtttctgccc

SEQ ID NO: 26288 - DNA, 25 bp, Homo sapiens
ctgcccacggttttgtttgtgcaat

SEQ ID NO: 26289 - DNA, 25 bp, Homo sapiens
gaaacacatgctggacatcccttgt

SEQ ID NO: 26290 - DNA, 25 bp, Homo sapiens
gaagaaccatcgaaacctgtttgtt

SEQ ID NO: 26291 - DNA, 25 bp, Homo sapiens
ggtctctttctgccgaatgttatgt

SEQ ID NO: 26292 - DNA, 25 bp, Homo sapiens
ggtggcaattgctttctgatatcag

SEQ ID NO: 26293 - DNA, 25 bp, Homo sapiens
gtgcagactctgagtgttccaggga

SEQ ID NO: 26294 - DNA, 25 bp, Homo sapiens
aactgtgtagatgcgtaccccactt

SEQ ID NO: 26295 - DNA, 25 bp, Homo sapiens
agcacccctggctacatatttggga

SEQ ID NO: 26296 - DNA, 25 bp, Homo sapiens
cctcatgtccgttgctggcatattc

SEQ ID NO: 26297 - DNA, 25 bp, Homo sapiens
gaccggaacacttgcctttgagcgg

SEQ ID NO: 26298 - DNA, 25 bp, Homo sapiens
gactgatgtacttgtttgtgcggca

SEQ ID NO: 26299 - DNA, 25 bp, Homo sapiens
ggaaacgcatcatactcttcctgtt

SEQ ID NO: 26300 - DNA, 25 bp, Homo sapiens
ggggctactttgcagccaagttcct

SEQ ID NO: 26301 - DNA, 25 bp, Homo sapiens
gtaggcaatgttgtcctgttggcca

SEQ ID NO: 26302 - DNA, 25 bp, Homo sapiens
gtctacactgccaaccagaactgtg

SEQ ID NO: 26303 - DNA, 25 bp, Homo sapiens
tattcaactattacctcatcttctt

SEQ ID NO: 26304 - DNA, 25 bp, Homo sapiens
tgctgcgtttgctggactgatgtac

SEQ ID NO: 26305 - DNA, 25 bp, Homo sapiens
agctgatggtgagcggcacagtccc

SEQ ID NO: 26306 - DNA, 25 bp, Homo sapiens
atcttgctactggctctagatctgc

SEQ ID NO: 26307 - DNA, 25 bp, Homo sapiens
cccatctccccaagtaggtggtgtt

SEQ ID NO: 26308 - DNA, 25 bp, Homo sapiens
ctcccttttatttttgtgcgcgata

SEQ ID NO: 26309 - DNA, 25 bp, Homo sapiens
cttcgcctcagcagcaaatcttgct

SEQ ID NO: 26310 - DNA, 25 bp, Homo sapiens
gaagcaacctgcagctgaggtcgcc

SEQ ID NO: 26311 - DNA, 25 bp, Homo sapiens
gcagtccagggtaccctgactgtcc

SEQ ID NO: 26312 - DNA, 25 bp, Homo sapiens
gtcagcttaaccatttcctatgtgc

SEQ ID NO: 26313 - DNA, 25 bp, Homo sapiens
gttgagactgagttcctgttgggac

SEQ ID NO: 26314 - DNA, 25 bp, Homo sapiens
tcggcagtaacctactttgttcctt

SEQ ID NO: 26315 - DNA, 25 bp, Homo sapiens
ttttcatgccctctaccatgtgggc

SEQ ID NO: 26316 - DNA, 25 bp, Homo sapiens
aagatggagattccaggcccgatgc

SEQ ID NO: 26317 - DNA, 25 bp, Homo sapiens
agccctacatgttcccaaggatgct

SEQ ID NO: 26318 - DNA, 25 bp, Homo sapiens
atatcctgatgctgcgtatctgcac

SEQ ID NO: 26319 - DNA, 25 bp, Homo sapiens
atgcctcccttaatccgagagatgc

SEQ ID NO: 26320 - DNA, 25 bp, Homo sapiens
ctccggggcatcagcactaagggag

SEQ ID NO: 26321 - DNA, 25 bp, Homo sapiens
gctgaaagggccattactctgaaga

SEQ ID NO: 26322 - DNA, 25 bp, Homo sapiens
gtatctgcacaaggtacaccccaga

SEQ ID NO: 26323 - DNA, 25 bp, Homo sapiens
gtttgaggatgactcctcgcagcct

SEQ ID NO: 26324 - DNA, 25 bp, Homo sapiens
tcaaagctgcctgcctagatatcct

SEQ ID NO: 26325 - DNA, 25 bp, Homo sapiens
tgctaatgaaaatcaccgacctccg

SEQ ID NO: 26326 - DNA, 25 bp, Homo sapiens
tggacaagctgcaggagccactgct

SEQ ID NO: 26327 - DNA, 25 bp, Homo sapiens
agatgagtgaactgagtgtggcaca

SEQ ID NO: 26328 - DNA, 25 bp, Homo sapiens
atggggatgagtgtgcctaccatca

SEQ ID NO: 26329 - DNA, 25 bp, Homo sapiens
ctcaatgtacaagaccggactgcac

SEQ ID NO: 26330 - DNA, 25 bp, Homo sapiens
gaattccagtactgtctccaaaacc

SEQ ID NO: 26331 - DNA, 25 bp, Homo sapiens
gctgcaagtactggcctgcttgtaa

SEQ ID NO: 26332 - DNA, 25 bp, Homo sapiens
gtcccttctatcatccaaaacattg

SEQ ID NO: 26333 - DNA, 25 bp, Homo sapiens
gtcctgcctggcagaagatcatgca

SEQ ID NO: 26334 - DNA, 25 bp, Homo sapiens
gtgtactaaaccagattgtcccttc

SEQ ID NO: 26335 - DNA, 25 bp, Homo sapiens
tgcaaagccttccccaattgtaaat

SEQ ID NO: 26336 - DNA, 25 bp, Homo sapiens
ttgtcccttcactcatgtgagtaga

SEQ ID NO: 26337 - DNA, 25 bp, Homo sapiens
ttttggagcgctgcaagtactggcc

SEQ ID NO: 26338 - DNA, 25 bp, Homo sapiens
acagggctgtttaagtcactgactt

SEQ ID NO: 26339 - DNA, 25 bp, Homo sapiens
agcagttttactatcgaatcaatcg

SEQ ID NO: 26340 - DNA, 25 bp, Homo sapiens
agggattttcctgctctatataagc

SEQ ID NO: 26341 - DNA, 25 bp, Homo sapiens
atttgtacatcttttttcaatctgt

SEQ ID NO: 26342 - DNA, 25 bp, Homo sapiens
caatctgtacatttgggctgtcttg

SEQ ID NO: 26343 - DNA, 25 bp, Homo sapiens
gaatcaatcgctgttattttttttt

SEQ ID NO: 26344 - DNA, 25 bp, Homo sapiens
gagaaagcaaagcactggtacagtt

SEQ ID NO: 26345 - DNA, 25 bp, Homo sapiens
gtactgcaataatcacagctctggg

SEQ ID NO: 26346 - DNA, 25 bp, Homo sapiens
gttattttcctatatctcacagtat

SEQ ID NO: 26347 - DNA, 25 bp, Homo sapiens
tcttgtatgtttttatgctcctttt

SEQ ID NO: 26348 - DNA, 25 bp, Homo sapiens
tgacctcggtcacaaaagcagtttt

SEQ ID NO: 26349 - DNA, 25 bp, Homo sapiens
aaataaatgttattgtcctcacctt

SEQ ID NO: 26350 - DNA, 25 bp, Homo sapiens
atgtatgttgtcttcttcaatactg

SEQ ID NO: 26351 - DNA, 25 bp, Homo sapiens
cagctcttccatagggcagttgttg

SEQ ID NO: 26352 - DNA, 25 bp, Homo sapiens
gagctgaagtaatgtgtgggccgca

SEQ ID NO: 26353 - DNA, 25 bp, Homo sapiens
gatttcaaggtttgtgctgagctcc

SEQ ID NO: 26354 - DNA, 25 bp, Homo sapiens
gctgatcagtaaaccaatcccttga

SEQ ID NO: 26355 - DNA, 25 bp, Homo sapiens
gtccttggttcttaaaagcattctg

SEQ ID NO: 26356 - DNA, 25 bp, Homo sapiens
gtgtgggccgcatgcataaagtaag

SEQ ID NO: 26357 - DNA, 25 bp, Homo sapiens
tagggacagaattaccccagcctct

SEQ ID NO: 26358 - DNA, 25 bp, Homo sapiens
tagggcagttgttgcttcttaattc

SEQ ID NO: 26359 - DNA, 25 bp, Homo sapiens
tttggagtgctttttatgtatgttg

SEQ ID NO: 26360 - DNA, 25 bp, Homo sapiens
actctgtctaaagagggccacagtg

SEQ ID NO: 26361 - DNA, 25 bp, Homo sapiens
caggcaggcccttgggtgctaaggg

SEQ ID NO: 26362 - DNA, 25 bp, Homo sapiens
gacaagtgggcactgagaccctggt

SEQ ID NO: 26363 - DNA, 25 bp, Homo sapiens
gagctcctactctgtctaaagaggg

SEQ ID NO: 26364 - DNA, 25 bp, Homo sapiens
gcggccttggatgagcagatgctgc

SEQ ID NO: 26365 - DNA, 25 bp, Homo sapiens
gctcctactctgtctaaagagggcc

SEQ ID NO: 26366 - DNA, 25 bp, Homo sapiens
gctgggctgcatgtgggtagcccga

SEQ ID NO: 26367 - DNA, 25 bp, Homo sapiens
ggcaggcccttgggtgctaagggct

SEQ ID NO: 26368 - DNA, 25 bp, Homo sapiens
gggctgcatgtgggtagcccgagct

SEQ ID NO: 26369 - DNA, 25 bp, Homo sapiens
ggttggaggacaagtgggcactgag

SEQ ID NO: 26370 - DNA, 25 bp, Homo sapiens
gtcactgttggttggaggacaagtg

SEQ ID NO: 26371 - DNA, 25 bp, Homo sapiens
acactggttttcatgcgctgttttt

SEQ ID NO: 26372 - DNA, 25 bp, Homo sapiens
acctggcaatcagctgagttgagac

SEQ ID NO: 26373 - DNA, 25 bp, Homo sapiens
actgattactggctgtgtcttgggt

SEQ ID NO: 26374 - DNA, 25 bp, Homo sapiens
gaaatgatttcctggctggccaact

SEQ ID NO: 26375 - DNA, 25 bp, Homo sapiens
gaacttgctatgtaatttgtgtcta

SEQ ID NO: 26376 - DNA, 25 bp, Homo sapiens
gagccaccaggaaggcgcatcttag

SEQ ID NO: 26377 - DNA, 25 bp, Homo sapiens
gatggtgatgttcacctggcaatca

SEQ ID NO: 26378 - DNA, 25 bp, Homo sapiens
ggacactaagtccattgttacatga

SEQ ID NO: 26379 - DNA, 25 bp, Homo sapiens
tggacctagactgtgcttttctgtc

SEQ ID NO: 26380 - DNA, 25 bp, Homo sapiens
ttgacccaccttgagagagagccac

SEQ ID NO: 26381 - DNA, 25 bp, Homo sapiens
ttgggtgggcagaaactcgaacttg

SEQ ID NO: 26382 - DNA, 25 bp, Homo sapiens
aactcctgagctcaaacagtcgtcc

SEQ ID NO: 26383 - DNA, 25 bp, Homo sapiens
aagaaatagcctccccaaagtcttg

SEQ ID NO: 26384 - DNA, 25 bp, Homo sapiens
atccctgtgccccagtgattaagtt

SEQ ID NO: 26385 - DNA, 25 bp, Homo sapiens
gatagcattggtcttgacaagcacc

SEQ ID NO: 26386 - DNA, 25 bp, Homo sapiens
gcactacagtctgaaactcctgagc

SEQ ID NO: 26387 - DNA, 25 bp, Homo sapiens
ggcaaggtctcactaagggctggaa

SEQ ID NO: 26388 - DNA, 25 bp, Homo sapiens
gggattacaagcgtgcatccctgtg

SEQ ID NO: 26389 - DNA, 25 bp, Homo sapiens
gtggctattcacaggtgcagtcata

SEQ ID NO: 26390 - DNA, 25 bp, Homo sapiens
taaagtctcccttaaaatgcaccct

SEQ ID NO: 26391 - DNA, 25 bp, Homo sapiens
tacagtttgatttatctctcgtcat

SEQ ID NO: 26392 - DNA, 25 bp, Homo sapiens
tccttccacctggccaggaatcaga

SEQ ID NO: 26393 - DNA, 25 bp, Homo sapiens
aaccccatggagctgtcttattgat

SEQ ID NO: 26394 - DNA, 25 bp, Homo sapiens
aagtacatcatggctggttgcccct

SEQ ID NO: 26395 - DNA, 25 bp, Homo sapiens
agaagcctcataactgttctacctc

SEQ ID NO: 26396 - DNA, 25 bp, Homo sapiens
agtatcttattggggctgcacctat

SEQ ID NO: 26397 - DNA, 25 bp, Homo sapiens
atctctgggatgtgactgaccgcga

SEQ ID NO: 26398 - DNA, 25 bp, Homo sapiens
cacggaagctctgctgcaaggctgg

SEQ ID NO: 26399 - DNA, 25 bp, Homo sapiens
cccccttctctactatgtaaaccag

SEQ ID NO: 26400 - DNA, 25 bp, Homo sapiens
gcacctatagcctatggcttgcctg

SEQ ID NO: 26401 - DNA, 25 bp, Homo sapiens
gcgacattgaccgctacacggaagc

SEQ ID NO: 26402 - DNA, 25 bp, Homo sapiens
gttgccccttgtttctgggtaatct

SEQ ID NO: 26403 - DNA, 25 bp, Homo sapiens
tgtttggctgtagcagtgcggccct

SEQ ID NO: 26404 - DNA, 25 bp, Homo sapiens
aattgctggatggtatggtagttct

SEQ ID NO: 26405 - DNA, 25 bp, Homo sapiens
acactaattggtttcctctagggtg

SEQ ID NO: 26406 - DNA, 25 bp, Homo sapiens
cctacttggcttctatcaccaacag

SEQ ID NO: 26407 - DNA, 25 bp, Homo sapiens
gacacatgtatctaagtgggaccaa

SEQ ID NO: 26408 - DNA, 25 bp, Homo sapiens
gacttggatgtgactcctacttggc

SEQ ID NO: 26409 - DNA, 25 bp, Homo sapiens
gtcattttttcatttgtccttttct

SEQ ID NO: 26410 - DNA, 25 bp, Homo sapiens
gtgatattcgtcattactctgtctc

SEQ ID NO: 26411 - DNA, 25 bp, Homo sapiens
gtttcctctagggtgatattcgtca

SEQ ID NO: 26412 - DNA, 25 bp, Homo sapiens
tatcaccttcctcttgtcagaatga

SEQ ID NO: 26413 - DNA, 25 bp, Homo sapiens
tctcttcaatccatccagctaaatg

SEQ ID NO: 26414 - DNA, 25 bp, Homo sapiens
ttaccctaactactctgacttgatc

SEQ ID NO: 26415 - DNA, 25 bp, Homo sapiens
caataggagtccttccttgtctttt

SEQ ID NO: 26416 - DNA, 25 bp, Homo sapiens
cagttattctagtttgtttcccatg

SEQ ID NO: 26417 - DNA, 25 bp, Homo sapiens
gacaatgacagcttttaactcttca

SEQ ID NO: 26418 - DNA, 25 bp, Homo sapiens
gagactttctctaccattaagctct

SEQ ID NO: 26419 - DNA, 25 bp, Homo sapiens
gccagtcagcaatttctaacagcat

SEQ ID NO: 26420 - DNA, 25 bp, Homo sapiens
gctggcccacaggtcatgaattgag

SEQ ID NO: 26421 - DNA, 25 bp, Homo sapiens
gtattattcatgatagctggcccac

SEQ ID NO: 26422 - DNA, 25 bp, Homo sapiens
gtcagtgacagtcttgccagtcagc

SEQ ID NO: 26423 - DNA, 25 bp, Homo sapiens
gtttcccatggaatctgtcctaaac

SEQ ID NO: 26424 - DNA, 25 bp, Homo sapiens
taactcttcaagtcacctaaagcta

SEQ ID NO: 26425 - DNA, 25 bp, Homo sapiens
tactcatgcctttttgtttaggata

SEQ ID NO: 26426 - DNA, 25 bp, Homo sapiens
acaacagtgttaaatggccatttgc

SEQ ID NO: 26427 - DNA, 25 bp, Homo sapiens
acaggcctttgccacaacagagaag

SEQ ID NO: 26428 - DNA, 25 bp, Homo sapiens
agagtggcagacagcatggctctca

SEQ ID NO: 26429 - DNA, 25 bp, Homo sapiens
ccatttgcacaggcctttgccacaa

SEQ ID NO: 26430 - DNA, 25 bp, Homo sapiens
cctcagaagctctggatgtctttgg

SEQ ID NO: 26431 - DNA, 25 bp, Homo sapiens
cctggacagtagagcgagaccccat

SEQ ID NO: 26432 - DNA, 25 bp, Homo sapiens
cctggcgtaatggcaggcgcctata

SEQ ID NO: 26433 - DNA, 25 bp, Homo sapiens
ggtcagctaaaactcagctgcagcc

SEQ ID NO: 26434 - DNA, 25 bp, Homo sapiens
gtaagttatacttgtgagcccacag

SEQ ID NO: 26435 - DNA, 25 bp, Homo sapiens
gtacacagaggtacctcagaagctc

SEQ ID NO: 26436 - DNA, 25 bp, Homo sapiens
tgggggttttgctaagtgtatcttg

SEQ ID NO: 26437 - DNA, 25 bp, Homo sapiens
aaaagattatttaatgcccatttca

SEQ ID NO: 26438 - DNA, 25 bp, Homo sapiens
aaatcactaaacctcgttttctcag

SEQ ID NO: 26439 - DNA, 25 bp, Homo sapiens
aacagtaatagttattggtgtcaca

SEQ ID NO: 26440 - DNA, 25 bp, Homo sapiens
acttgaagtctagtagtgcactgta

SEQ ID NO: 26441 - DNA, 25 bp, Homo sapiens
agaggcattcattagttttatacat

SEQ ID NO: 26442 - DNA, 25 bp, Homo sapiens
cactaaacctcgttttctcagcagc

SEQ ID NO: 26443 - DNA, 25 bp, Homo sapiens
ctgtcagtcagaggcattcattagt

SEQ ID NO: 26444 - DNA, 25 bp, Homo sapiens
gcatgagtcatgttcacacttgaag

SEQ ID NO: 26445 - DNA, 25 bp, Homo sapiens
tacacagctacagaaacaatttggg

SEQ ID NO: 26446 - DNA, 25 bp, Homo sapiens
tggtgtcacataaaactgatttgtt

SEQ ID NO: 26447 - DNA, 25 bp, Homo sapiens
tgttttttacagccaaacctctgtc

SEQ ID NO: 26448 - DNA, 25 bp, Homo sapiens
aaactcaactcggcaatccaagcac

SEQ ID NO: 26449 - DNA, 25 bp, Homo sapiens
catcttcattcataggtctgcgctg

SEQ ID NO: 26450 - DNA, 25 bp, Homo sapiens
ccttccacgactagaaccttaggca

SEQ ID NO: 26451 - DNA, 25 bp, Homo sapiens
cttggtaacaggcacatcttcctcc

SEQ ID NO: 26452 - DNA, 25 bp, Homo sapiens
gcacctagataccagcacaagtcgg

SEQ ID NO: 26453 - DNA, 25 bp, Homo sapiens
gccgggacgaagcacttggtaacag

SEQ ID NO: 26454 - DNA, 25 bp, Homo sapiens
gcttcacggctggctatgtggacag

SEQ ID NO: 26455 - DNA, 25 bp, Homo sapiens
ggcaatccaagcacctagataccag

SEQ ID NO: 26456 - DNA, 25 bp, Homo sapiens
tccctccatcttcattcataggtct

SEQ ID NO: 26457 - DNA, 25 bp, Homo sapiens
tcggttaatccctgtctggactgag

SEQ ID NO: 26458 - DNA, 25 bp, Homo sapiens
tgcctcctaggaggacatttagggg

SEQ ID NO: 26459 - DNA, 25 bp, Homo sapiens
aagactggccagacgcactggctca

SEQ ID NO: 26460 - DNA, 25 bp, Homo sapiens
accaaactctccatcgctgaaagag

SEQ ID NO: 26461 - DNA, 25 bp, Homo sapiens
accactcggctccatggggaggttt

SEQ ID NO: 26462 - DNA, 25 bp, Homo sapiens
agggcccatgatgagctgtaacttc

SEQ ID NO: 26463 - DNA, 25 bp, Homo sapiens
caaggacaaccactatttctatatt

SEQ ID NO: 26464 - DNA, 25 bp, Homo sapiens
cagtgggacatggtgccgtttttct

SEQ ID NO: 26465 - DNA, 25 bp, Homo sapiens
gaattctgttattaagggcccatga

SEQ ID NO: 26466 - DNA, 25 bp, Homo sapiens
ggatctaggttgacctgtctgtgat

SEQ ID NO: 26467 - DNA, 25 bp, Homo sapiens
tctgtttgccttcttgcaacaacag

SEQ ID NO: 26468 - DNA, 25 bp, Homo sapiens
tgtgattttcaaccctgtggtccag

SEQ ID NO: 26469 - DNA, 25 bp, Homo sapiens
ttgactttgttttcagatgatgcct

SEQ ID NO: 26470 - DNA, 25 bp, Homo sapiens
acacgcattgatttttgcctggaat

SEQ ID NO: 26471 - DNA, 25 bp, Homo sapiens
actgggcatatcaacaggtccaaca

SEQ ID NO: 26472 - DNA, 25 bp, Homo sapiens
agcatactattcctgccatgcttga

SEQ ID NO: 26473 - DNA, 25 bp, Homo sapiens
agctaggaattgtttcccttctact

SEQ ID NO: 26474 - DNA, 25 bp, Homo sapiens
atatattttatcaccaacatttcaa

SEQ ID NO: 26475 - DNA, 25 bp, Homo sapiens
ccttctactgggcacaatacacgca

SEQ ID NO: 26476 - DNA, 25 bp, Homo sapiens
gaggcgatcctacagatacaagttg

SEQ ID NO: 26477 - DNA, 25 bp, Homo sapiens
ggtatacacctccaacttttatgat

SEQ ID NO: 26478 - DNA, 25 bp, Homo sapiens
gtctctgggaattgtgggattggca

SEQ ID NO: 26479 - DNA, 25 bp, Homo sapiens
gtctgtcttacccaatgaggcgatc

SEQ ID NO: 26480 - DNA, 25 bp, Homo sapiens
gttggctgtgacatctattccatct

SEQ ID NO: 26481 - DNA, 25 bp, Homo sapiens
aaggcttgataccaatcgagctaag

SEQ ID NO: 26482 - DNA, 25 bp, Homo sapiens
aatcgagctaaggatacctgctttg

SEQ ID NO: 26483 - DNA, 25 bp, Homo sapiens
agatttaacctctgccatgtgtttt

SEQ ID NO: 26484 - DNA, 25 bp, Homo sapiens
agcagtgctgactaagccgaagttt

SEQ ID NO: 26485 - DNA, 25 bp, Homo sapiens
gatatcttcatagcaatgtctccta

SEQ ID NO: 26486 - DNA, 25 bp, Homo sapiens
gcaatgtctcctaaaggtgttttgt

SEQ ID NO: 26487 - DNA, 25 bp, Homo sapiens
gcagccgctgtaggaaccaattctt

SEQ ID NO: 26488 - DNA, 25 bp, Homo sapiens
ggatacctgctttggaagcatgttt

SEQ ID NO: 26489 - DNA, 25 bp, Homo sapiens
gtgattctgcttataagtcatttat

SEQ ID NO: 26490 - DNA, 25 bp, Homo sapiens
tcaatgccttgattagacctaattt

SEQ ID NO: 26491 - DNA, 25 bp, Homo sapiens
ttctaaaccttgtgattctgcttat

SEQ ID NO: 26492 - DNA, 25 bp, Homo sapiens
aaaggctgcctcctttaaactgcag

SEQ ID NO: 26493 - DNA, 25 bp, Homo sapiens
aacttcctgcaggtaaacagttctt

SEQ ID NO: 26494 - DNA, 25 bp, Homo sapiens
agcacagctgccaagtcatttgagg

SEQ ID NO: 26495 - DNA, 25 bp, Homo sapiens
atttgaggatctcacggaccatccg

SEQ ID NO: 26496 - DNA, 25 bp, Homo sapiens
cagctccaaaactggaccaccagag

SEQ ID NO: 26497 - DNA, 25 bp, Homo sapiens
cccttcccaaatagcagcacagctg

SEQ ID NO: 26498 - DNA, 25 bp, Homo sapiens
gagaaggaccccttcccaaatagca

SEQ ID NO: 26499 - DNA, 25 bp, Homo sapiens
ggaccaccagagaatggacaccatc

SEQ ID NO: 26500 - DNA, 25 bp, Homo sapiens
gtgacttagcagatgctggtcatgt

SEQ ID NO: 26501 - DNA, 25 bp, Homo sapiens
taaactgcagcgtcagaatcgtgtt

SEQ ID NO: 26502 - DNA, 25 bp, Homo sapiens
tttagttctcagctcttctgactta

SEQ ID NO: 26503 - DNA, 25 bp, Homo sapiens
agcccctgcccatctgggaaaatac

SEQ ID NO: 26504 - DNA, 25 bp, Homo sapiens
cttgttcacactctcacatgtttag

SEQ ID NO: 26505 - DNA, 25 bp, Homo sapiens
gaaaataccccatcattcatgctac

SEQ ID NO: 26506 - DNA, 25 bp, Homo sapiens
gaagactctaccagactgtgtattc

SEQ ID NO: 26507 - DNA, 25 bp, Homo sapiens
gaccacaaatagtgctcgctttcta

SEQ ID NO: 26508 - DNA, 25 bp, Homo sapiens
ggctatgggagcagcttttttttcc

SEQ ID NO: 26509 - DNA, 25 bp, Homo sapiens
gtaccccaatttacttgccattact

SEQ ID NO: 26510 - DNA, 25 bp, Homo sapiens
gtcatccaatctaaccacatcaata

SEQ ID NO: 26511 - DNA, 25 bp, Homo sapiens
gtgctcgctttctatgtagtttggt

SEQ ID NO: 26512 - DNA, 25 bp, Homo sapiens
tgttccttcaagatcatgtacccca

SEQ ID NO: 26513 - DNA, 25 bp, Homo sapiens
ttataatctgatttgttttcctctt

SEQ ID NO: 26514 - DNA, 25 bp, Homo sapiens
atggcagggtttgttggacacctac

SEQ ID NO: 26515 - DNA, 25 bp, Homo sapiens
cactgagggagtggcccagaccagc

SEQ ID NO: 26516 - DNA, 25 bp, Homo sapiens
ctcatgggtttgtgacagcccctgc

SEQ ID NO: 26517 - DNA, 25 bp, Homo sapiens
gacgtctatgactgccaggtggagc

SEQ ID NO: 26518 - DNA, 25 bp, Homo sapiens
gagtgggatcaacatctgtcctacg

SEQ ID NO: 26519 - DNA, 25 bp, Homo sapiens
gcaacggccaaactgtcactgaggg

SEQ ID NO: 26520 - DNA, 25 bp, Homo sapiens
tcccgctgtgctgactttgagtggg

SEQ ID NO: 26521 - DNA, 25 bp, Homo sapiens
tgccctcagccgaggacgtctatga

SEQ ID NO: 26522 - DNA, 25 bp, Homo sapiens
tgctcagtgccctttaagtgcatcc

SEQ ID NO: 26523 - DNA, 25 bp, Homo sapiens
ttggccccagtattcatggcagggt

SEQ ID NO: 26524 - DNA, 25 bp, Homo sapiens
tttgttggacacctactagcttccc

SEQ ID NO: 26525 - DNA, 25 bp, Homo sapiens
aagcggaatgactacgtgcacgccc

SEQ ID NO: 26526 - DNA, 25 bp, Homo sapiens
agttcacacgctgccacaagaggac

SEQ ID NO: 26527 - DNA, 25 bp, Homo sapiens
caccatcgacctggacttcaagggc

SEQ ID NO: 26528 - DNA, 25 bp, Homo sapiens
cccgttctgcctgcaagtgaagcgg

SEQ ID NO: 26529 - DNA, 25 bp, Homo sapiens
ggaggtggacatctataccgtcaag

SEQ ID NO: 26530 - DNA, 25 bp, Homo sapiens
ggggagggcacatcgtgactgtgtt

SEQ ID NO: 26531 - DNA, 25 bp, Homo sapiens
tcaagggccagctgtgcgagctgtc

SEQ ID NO: 26532 - DNA, 25 bp, Homo sapiens
tccccgtacacgcactggaagcaga

SEQ ID NO: 26533 - DNA, 25 bp, Homo sapiens
tggaccccaaacagctggtcaccaa

SEQ ID NO: 26534 - DNA, 25 bp, Homo sapiens
tggaggactacctgaccgtgaagac

SEQ ID NO: 26535 - DNA, 25 bp, Homo sapiens
tggcctacttcaacatcgagttcac

SEQ ID NO: 26536 - DNA, 25 bp, Homo sapiens
acagagcatgtctttacagatcctt

SEQ ID NO: 26537 - DNA, 25 bp, Homo sapiens
agaaggtgtgacgggagctgccact

SEQ ID NO: 26538 - DNA, 25 bp, Homo sapiens
agctcagcagagacagacagcctgt

SEQ ID NO: 26539 - DNA, 25 bp, Homo sapiens
caactctcatgttctgtgcattgca

SEQ ID NO: 26540 - DNA, 25 bp, Homo sapiens
ctcccaaactggcgtctacacagag

SEQ ID NO: 26541 - DNA, 25 bp, Homo sapiens
gaggcatcacagtggttggttgttc

SEQ ID NO: 26542 - DNA, 25 bp, Homo sapiens
gcacgagaaacagactaccctgcag

SEQ ID NO: 26543 - DNA, 25 bp, Homo sapiens
ggagttcagatcccagaagacctct

SEQ ID NO: 26544 - DNA, 25 bp, Homo sapiens
gtttcactgtttgcaactctcatgt

SEQ ID NO: 26545 - DNA, 25 bp, Homo sapiens
tgccacttcccctagtacaaatggt

SEQ ID NO: 26546 - DNA, 25 bp, Homo sapiens
tgtgcattgcaagtgtgccaggtgc

SEQ ID NO: 26547 - DNA, 25 bp, Homo sapiens
aagtggggactcataggcttggggc

SEQ ID NO: 26548 - DNA, 25 bp, Homo sapiens
actgctgctccttgcaaggtagcaa

SEQ ID NO: 26549 - DNA, 25 bp, Homo sapiens
aggccaacctcacaggggtgctgtg

SEQ ID NO: 26550 - DNA, 25 bp, Homo sapiens
atgggcatgcattttccttagcagt

SEQ ID NO: 26551 - DNA, 25 bp, Homo sapiens
ccctgagagtctctgagcctctagc

SEQ ID NO: 26552 - DNA, 25 bp, Homo sapiens
gagcctctagcctggtatgacatca

SEQ ID NO: 26553 - DNA, 25 bp, Homo sapiens
gcctgcctgcaggagtgatgcggcc

SEQ ID NO: 26554 - DNA, 25 bp, Homo sapiens
gggaggacaatgtctgatggcccct

SEQ ID NO: 26555 - DNA, 25 bp, Homo sapiens
tacccacacaaacccacattgagtt

SEQ ID NO: 26556 - DNA, 25 bp, Homo sapiens
tatagacaggacccatgctcctaca

SEQ ID NO: 26557 - DNA, 25 bp, Homo sapiens
tgtgtttgaaatcactgctgctcct

SEQ ID NO: 26558 - DNA, 25 bp, Homo sapiens
aaagtgaccctttatacatttcatt

SEQ ID NO: 26559 - DNA, 25 bp, Homo sapiens
agacaattaattatcccctcttaca

SEQ ID NO: 26560 - DNA, 25 bp, Homo sapiens
atcctacaaagtgaccctttataca

SEQ ID NO: 26561 - DNA, 25 bp, Homo sapiens
catacttacccacatgtacacagag

SEQ ID NO: 26562 - DNA, 25 bp, Homo sapiens
ccacatacttacccacatgtacaca

SEQ ID NO: 26563 - DNA, 25 bp, Homo sapiens
gatgcctaatcctacaaagtgaccc

SEQ ID NO: 26564 - DNA, 25 bp, Homo sapiens
gcctaatcctacaaagtgacccttt

SEQ ID NO: 26565 - DNA, 25 bp, Homo sapiens
gtagaaggaggatgcctaatcctac

SEQ ID NO: 26566 - DNA, 25 bp, Homo sapiens
gtgaccctttatacatttcattttt

SEQ ID NO: 26567 - DNA, 25 bp, Homo sapiens
gttatatggagaattctgaatccca

SEQ ID NO: 26568 - DNA, 25 bp, Homo sapiens
gttgagagacaattaattatcccct

SEQ ID NO: 26569 - DNA, 25 bp, Homo sapiens
aaatctctttggcagtaacagtctt

SEQ ID NO: 26570 - DNA, 25 bp, Homo sapiens
aagtggtgctttgtggtatctgaac

SEQ ID NO: 26571 - DNA, 25 bp, Homo sapiens
cagccctatgatcaagcccaaagga

SEQ ID NO: 26572 - DNA, 25 bp, Homo sapiens
gaccttggctctaaagagtacccgg

SEQ ID NO: 26573 - DNA, 25 bp, Homo sapiens
ggctcaggcagcagtgtagcagatg

SEQ ID NO: 26574 - DNA, 25 bp, Homo sapiens
ggtggaatacttagatctcgactta

SEQ ID NO: 26575 - DNA, 25 bp, Homo sapiens
gtccacagaatcagaaacgccagcg

SEQ ID NO: 26576 - DNA, 25 bp, Homo sapiens
tacccgggaagcctggacagatggg

SEQ ID NO: 26577 - DNA, 25 bp, Homo sapiens
tatgttcccatgaacccaaacctgt

SEQ ID NO: 26578 - DNA, 25 bp, Homo sapiens
tccacaccaccacgtaagcaaaaga

SEQ ID NO: 26579 - DNA, 25 bp, Homo sapiens
tgacttgacacttccactctaggta

SEQ ID NO: 26580 - DNA, 25 bp, Homo sapiens
aactctgcgtggactatggacagtc

SEQ ID NO: 26581 - DNA, 25 bp, Homo sapiens
acttagatggagttggtcaaatgag

SEQ ID NO: 26582 - DNA, 25 bp, Homo sapiens
atctgtaaaaggtttctccctactg

SEQ ID NO: 26583 - DNA, 25 bp, Homo sapiens
gagggaacatctgggttatgccttt

SEQ ID NO: 26584 - DNA, 25 bp, Homo sapiens
ggaacatctgggttatgcctttttt

SEQ ID NO: 26585 - DNA, 25 bp, Homo sapiens
ggagttgtaactctgcgtggactat

SEQ ID NO: 26586 - DNA, 25 bp, Homo sapiens
tctgcttatggcacaatttgcctca

SEQ ID NO: 26587 - DNA, 25 bp, Homo sapiens
tctttgtttgtaacttatctgtaaa

SEQ ID NO: 26588 - DNA, 25 bp, Homo sapiens
tgtaaaaggtttctccctactgtca

SEQ ID NO: 26589 - DNA, 25 bp, Homo sapiens
ttaggacttcattcctccatgtttt

SEQ ID NO: 26590 - DNA, 25 bp, Homo sapiens
ttgtaactctgcgtggactatggac

SEQ ID NO: 26591 - DNA, 25 bp, Homo sapiens
accagtctttcgacatgggcgtggc

SEQ ID NO: 26592 - DNA, 25 bp, Homo sapiens
ccctgccgatattgagtccctgcag

SEQ ID NO: 26593 - DNA, 25 bp, Homo sapiens
ctccccctgaacaatccttttcagt

SEQ ID NO: 26594 - DNA, 25 bp, Homo sapiens
ctgtgccttgctgccacagtagacc

SEQ ID NO: 26595 - DNA, 25 bp, Homo sapiens
gaggctcggcttggattattctgca

SEQ ID NO: 26596 - DNA, 25 bp, Homo sapiens
gatggccaggcagattcagcctctc

SEQ ID NO: 26597 - DNA, 25 bp, Homo sapiens
gcttgctgactggctcgaaggccat

SEQ ID NO: 26598 - DNA, 25 bp, Homo sapiens
gtgagatccagatggactccccaat

SEQ ID NO: 26599 - DNA, 25 bp, Homo sapiens
gttctcaggcacaccaaagggcagt

SEQ ID NO: 26600 - DNA, 25 bp, Homo sapiens
tcaaaggctttagccctggacccag

SEQ ID NO: 26601 - DNA, 25 bp, Homo sapiens
ttctgcaggttcatctcagacccac

SEQ ID NO: 26602 - DNA, 25 bp, Homo sapiens
agagtcagtagttcagccagtgatt

SEQ ID NO: 26603 - DNA, 25 bp, Homo sapiens
ccaattttctggcacatcgtggagt

SEQ ID NO: 26604 - DNA, 25 bp, Homo sapiens
gaccattagctgatacatgcagaca

SEQ ID NO: 26605 - DNA, 25 bp, Homo sapiens
gactgcattcagaacattgaccatt

SEQ ID NO: 26606 - DNA, 25 bp, Homo sapiens
gatgtgtgtggtaagcgcttcagac

SEQ ID NO: 26607 - DNA, 25 bp, Homo sapiens
gccagtgattgggagaccacacagc

SEQ ID NO: 26608 - DNA, 25 bp, Homo sapiens
ggcttcagttggagctcaagtctta

SEQ ID NO: 26609 - DNA, 25 bp, Homo sapiens
ggtaagcgcttcagacagagatcct

SEQ ID NO: 26610 - DNA, 25 bp, Homo sapiens
ggtgacaaggactttccttcatcag

SEQ ID NO: 26611 - DNA, 25 bp, Homo sapiens
gtcttatcattcatcagcgagtcca

SEQ ID NO: 26612 - DNA, 25 bp, Homo sapiens
gttttactatctcagatgggtgctg

SEQ ID NO: 26613 - DNA, 25 bp, Homo sapiens
caccagatctccctttatggcaaga

SEQ ID NO: 26614 - DNA, 25 bp, Homo sapiens
ctcagggcagctcaaatgtggcacc

SEQ ID NO: 26615 - DNA, 25 bp, Homo sapiens
gaacaggctcttcagtgcgagttcc

SEQ ID NO: 26616 - DNA, 25 bp, Homo sapiens
gcagtgtggcctgatgtaatcaaac

SEQ ID NO: 26617 - DNA, 25 bp, Homo sapiens
gcgctagacttatttgattacatgc

SEQ ID NO: 26618 - DNA, 25 bp, Homo sapiens
taagccgaatatgtgggagtccatg

SEQ ID NO: 26619 - DNA, 25 bp, Homo sapiens
taagcgctgcactgctgaacaggct

SEQ ID NO: 26620 - DNA, 25 bp, Homo sapiens
tcaaactaccatatttcaacaccat

SEQ ID NO: 26621 - DNA, 25 bp, Homo sapiens
tgccttggatcctagtaagcgctgc

SEQ ID NO: 26622 - DNA, 25 bp, Homo sapiens
tggatgacagcagaaccaacacacc

SEQ ID NO: 26623 - DNA, 25 bp, Homo sapiens
ttcctgcagctgcgctagacttatt

SEQ ID NO: 26624 - DNA, 25 bp, Homo sapiens
aacatccacagttaaggttgggcca

SEQ ID NO: 26625 - DNA, 25 bp, Homo sapiens
attctgtctcttaatgcaatgacac

SEQ ID NO: 26626 - DNA, 25 bp, Homo sapiens
cacagttaaggttgggccagctacc

SEQ ID NO: 26627 - DNA, 25 bp, Homo sapiens
ccaggatttgagtctctgcatgaca

SEQ ID NO: 26628 - DNA, 25 bp, Homo sapiens
ggaagaattcggatccttaccattg

SEQ ID NO: 26629 - DNA, 25 bp, Homo sapiens
ggatccttaccattggaatcttcca

SEQ ID NO: 26630 - DNA, 25 bp, Homo sapiens
ggatttgagtctctgcatgacatat

SEQ ID NO: 26631 - DNA, 25 bp, Homo sapiens
taaggttgggccagctacctttggg

SEQ ID NO: 26632 - DNA, 25 bp, Homo sapiens
taccattggaatcttccatcgaaca

SEQ ID NO: 26633 - DNA, 25 bp, Homo sapiens
tccattccctctaagatgtaggaag

SEQ ID NO: 26634 - DNA, 25 bp, Homo sapiens
tgctccattccctctaagatgtagg

SEQ ID NO: 26635 - DNA, 25 bp, Homo sapiens
atccacagacggacgtcttcctcat

SEQ ID NO: 26636 - DNA, 25 bp, Homo sapiens
caagtggttcccagaagtgcggcac

SEQ ID NO: 26637 - DNA, 25 bp, Homo sapiens
cactggccaaggagattgactcggt

SEQ ID NO: 26638 - DNA, 25 bp, Homo sapiens
cccagcctcttatgagaacgtccgc

SEQ ID NO: 26639 - DNA, 25 bp, Homo sapiens
gacaaggacaccatcgagaaactga

SEQ ID NO: 26640 - DNA, 25 bp, Homo sapiens
gattgactcggtgaaatacctggag

SEQ ID NO: 26641 - DNA, 25 bp, Homo sapiens
gcgccaagtggttcccagaagtgcg

SEQ ID NO: 26642 - DNA, 25 bp, Homo sapiens
ggacctgcgggacgacaaggacacc

SEQ ID NO: 26643 - DNA, 25 bp, Homo sapiens
gtggttcccagaagtgcggcaccac

SEQ ID NO: 26644 - DNA, 25 bp, Homo sapiens
tcagcccagcctcttatgagaacgt

SEQ ID NO: 26645 - DNA, 25 bp, Homo sapiens
tcctatccacagacggacgtcttcc

SEQ ID NO: 26646 - DNA, 25 bp, Homo sapiens
aaacgaatatttccacaatgtctgt

SEQ ID NO: 26647 - DNA, 25 bp, Homo sapiens
atccagaaccgggcaggcaagacgc

SEQ ID NO: 26648 - DNA, 25 bp, Homo sapiens
caatgtctgtgaactggacctggtg

SEQ ID NO: 26649 - DNA, 25 bp, Homo sapiens
ctgatgctacagtccctggagtgag

SEQ ID NO: 26650 - DNA, 25 bp, Homo sapiens
gacctggtgttcaacttctacaagg

SEQ ID NO: 26651 - DNA, 25 bp, Homo sapiens
gacgccaaacacaccaactttgtgg

SEQ ID NO: 26652 - DNA, 25 bp, Homo sapiens
gatcgaggaggtgcatgccgtggtc

SEQ ID NO: 26653 - DNA, 25 bp, Homo sapiens
gccaagtggtacatgcagtttgatg

SEQ ID NO: 26654 - DNA, 25 bp, Homo sapiens
gcgcctggccaagtggtacatgcag

SEQ ID NO: 26655 - DNA, 25 bp, Homo sapiens
gtccctggagtgagggcaggcgagc

SEQ ID NO: 26656 - DNA, 25 bp, Homo sapiens
tctacaaggtttacacggtcgtgga

SEQ ID NO: 26657 - DNA, 25 bp, Homo sapiens
agcacacacttacagagcacaaatg

SEQ ID NO: 26658 - DNA, 25 bp, Homo sapiens
aggactcaaggtggacgtgcgttct

SEQ ID NO: 26659 - DNA, 25 bp, Homo sapiens
atttgctaaatgctgttcttacaca

SEQ ID NO: 26660 - DNA, 25 bp, Homo sapiens
gaagatttatgtcagcacacactta

SEQ ID NO: 26661 - DNA, 25 bp, Homo sapiens
gcacctagaaaattggtctctcttt

SEQ ID NO: 26662 - DNA, 25 bp, Homo sapiens
gcagtatataggtgctggatgtatg

SEQ ID NO: 26663 - DNA, 25 bp, Homo sapiens
ggagcagtggactgccacaagccac

SEQ ID NO: 26664 - DNA, 25 bp, Homo sapiens
taatttcttaattttcaccgagcag

SEQ ID NO: 26665 - DNA, 25 bp, Homo sapiens
tcaaggtggacgtgcgttctgcctt

SEQ ID NO: 26666 - DNA, 25 bp, Homo sapiens
tggatgtcccaatgcacctagaaaa

SEQ ID NO: 26667 - DNA, 25 bp, Homo sapiens
tggctgtggaccagtaggactcaag

SEQ ID NO: 26668 - DNA, 25 bp, Homo sapiens
aaaaccacacacaccagcaagatat

SEQ ID NO: 26669 - DNA, 25 bp, Homo sapiens
aagacagctttcacagtttgcggga

SEQ ID NO: 26670 - DNA, 25 bp, Homo sapiens
aaggcgaggtcaagtgcccaactgc

SEQ ID NO: 26671 - DNA, 25 bp, Homo sapiens
acctggtccgtgcactggagaaggc

SEQ ID NO: 26672 - DNA, 25 bp, Homo sapiens
caagggcagcaccatttctgccttc

SEQ ID NO: 26673 - DNA, 25 bp, Homo sapiens
caatctgcggctgacaaacgggctc

SEQ ID NO: 26674 - DNA, 25 bp, Homo sapiens
gaaatgcaagtaaccacctggtccg

SEQ ID NO: 26675 - DNA, 25 bp, Homo sapiens
gacgacctcaagcggcagaatgctc

SEQ ID NO: 26676 - DNA, 25 bp, Homo sapiens
gagctgatcaagttctttgttcctg

SEQ ID NO: 26677 - DNA, 25 bp, Homo sapiens
tcagtcccatcactccaaggagaga

SEQ ID NO: 26678 - DNA, 25 bp, Homo sapiens
tcctggggaattcacttctcttcct

SEQ ID NO: 26679 - DNA, 25 bp, Homo sapiens
aggcctagattacttgcacgggact

SEQ ID NO: 26680 - DNA, 25 bp, Homo sapiens
caaaggtcaccttcttgactccttt

SEQ ID NO: 26681 - DNA, 25 bp, Homo sapiens
cattctctgatgagcccttggaggc

SEQ ID NO: 26682 - DNA, 25 bp, Homo sapiens
cctgacctttgaacctctaacattg

SEQ ID NO: 26683 - DNA, 25 bp, Homo sapiens
cgcggacaatgcattttgggacccc

SEQ ID NO: 26684 - DNA, 25 bp, Homo sapiens
gaagctctcgagtggctcatcagag

SEQ ID NO: 26685 - DNA, 25 bp, Homo sapiens
gacccctacagcctacgagaaggaa

SEQ ID NO: 26686 - DNA, 25 bp, Homo sapiens
gcgactggctcaacaattaccacct

SEQ ID NO: 26687 - DNA, 25 bp, Homo sapiens
ggaatgcttcacatatgtcctcaag

SEQ ID NO: 26688 - DNA, 25 bp, Homo sapiens
gtcactgatgagcccgggtactatg

SEQ ID NO: 26689 - DNA, 25 bp, Homo sapiens
gtcctcaagggccacatagctgtga

SEQ ID NO: 26690 - DNA, 25 bp, Homo sapiens
agagtgcagcactgacgtggctcat

SEQ ID NO: 26691 - DNA, 25 bp, Homo sapiens
agttcccaccagaccagagaagggc

SEQ ID NO: 26692 - DNA, 25 bp, Homo sapiens
atatggactcatgttgggcctactc

SEQ ID NO: 26693 - DNA, 25 bp, Homo sapiens
gaaagccctactatgctcaaatcag

SEQ ID NO: 26694 - DNA, 25 bp, Homo sapiens
gaatttgtttgtcatgcaccttctg

SEQ ID NO: 26695 - DNA, 25 bp, Homo sapiens
gcaccttctgagtatttcaagtcac

SEQ ID NO: 26696 - DNA, 25 bp, Homo sapiens
tagccccagagaccaatttgatccc

SEQ ID NO: 26697 - DNA, 25 bp, Homo sapiens
tatccaggaccagtattgcgagaag

SEQ ID NO: 26698 - DNA, 25 bp, Homo sapiens
tcaagtcacggtcatcaccatttcc

SEQ ID NO: 26699 - DNA, 25 bp, Homo sapiens
tcccgcctcctatatcatagggcca

SEQ ID NO: 26700 - DNA, 25 bp, Homo sapiens
ttggtgatgttgtttctgtgattga

SEQ ID NO: 26701 - DNA, 25 bp, Homo sapiens
aacgatgtcgataccaagaagcaga

SEQ ID NO: 26702 - DNA, 25 bp, Homo sapiens
acgcccctgctgacgaggaaaatgg

SEQ ID NO: 26703 - DNA, 25 bp, Homo sapiens
agcgggcagctgaagatgatgagga

SEQ ID NO: 26704 - DNA, 25 bp, Homo sapiens
agtcagctacggacaagcgggcagc

SEQ ID NO: 26705 - DNA, 25 bp, Homo sapiens
ctccgaaatcaccaccgaggactta

SEQ ID NO: 26706 - DNA, 25 bp, Homo sapiens
gaaaatggaagagacgcccctgctg

SEQ ID NO: 26707 - DNA, 25 bp, Homo sapiens
gaagatgagggagctgagtcagcta

SEQ ID NO: 26708 - DNA, 25 bp, Homo sapiens
gcagaagaccgacgaggatgactag

SEQ ID NO: 26709 - DNA, 25 bp, Homo sapiens
ggagcaagaggctgacaatgaagta

SEQ ID NO: 26710 - DNA, 25 bp, Homo sapiens
ggtggggaggaagaaggtgatggtg

SEQ ID NO: 26711 - DNA, 25 bp, Homo sapiens
agaaagcagcgctgcagggggccaa

SEQ ID NO: 26712 - DNA, 25 bp, Homo sapiens
agagacgcagtctgcttgttccgac

SEQ ID NO: 26713 - DNA, 25 bp, Homo sapiens
aggtcccaagcgataacactgtcta

SEQ ID NO: 26714 - DNA, 25 bp, Homo sapiens
gaccctaaaaagtctgccagtcgcc

SEQ ID NO: 26715 - DNA, 25 bp, Homo sapiens
gagtaaccacagctgtacatccatg

SEQ ID NO: 26716 - DNA, 25 bp, Homo sapiens
gcagccggcgaggaagtgacgcttc

SEQ ID NO: 26717 - DNA, 25 bp, Homo sapiens
gcttctgactttgacctcttagaga

SEQ ID NO: 26718 - DNA, 25 bp, Homo sapiens
tccagctccagtgctagtcagagta

SEQ ID NO: 26719 - DNA, 25 bp, Homo sapiens
tgggagtcgggctgggagtcgagcc

SEQ ID NO: 26720 - DNA, 25 bp, Homo sapiens
tgtctaagaagaccaccactgcctc

SEQ ID NO: 26721 - DNA, 25 bp, Homo sapiens
ttcattctagtcggacatcccttgc

SEQ ID NO: 26722 - DNA, 25 bp, Homo sapiens
agcccctggtgtctgcagtggggga

SEQ ID NO: 26723 - DNA, 25 bp, Homo sapiens
caccgtgcaggttgtggccggtttt

SEQ ID NO: 26724 - DNA, 25 bp, Homo sapiens
cagtgggggatttaaggcacccgct

SEQ ID NO: 26725 - DNA, 25 bp, Homo sapiens
ctgtacacagccgagcagcatttcc

SEQ ID NO: 26726 - DNA, 25 bp, Homo sapiens
gcgacacatttttgtgcctttcagc

SEQ ID NO: 26727 - DNA, 25 bp, Homo sapiens
gcttccacttctttcttgtttggag

SEQ ID NO: 26728 - DNA, 25 bp, Homo sapiens
ggctccgaagacttagcgacgccac

SEQ ID NO: 26729 - DNA, 25 bp, Homo sapiens
tccgttgaaggacttgcatccccat

SEQ ID NO: 26730 - DNA, 25 bp, Homo sapiens
tgagctacaggactcccgagtgtga

SEQ ID NO: 26731 - DNA, 25 bp, Homo sapiens
tggattctgccattgcgacacattt

SEQ ID NO: 26732 - DNA, 25 bp, Homo sapiens
ttggagttttctgttggaaccgccg

SEQ ID NO: 26733 - DNA, 25 bp, Homo sapiens
aaagatcaacatccgcgtgctggac

SEQ ID NO: 26734 - DNA, 25 bp, Homo sapiens
agaaaactcattctcgacagcgctc

SEQ ID NO: 26735 - DNA, 25 bp, Homo sapiens
attgcacaagctgtgaggggcctca

SEQ ID NO: 26736 - DNA, 25 bp, Homo sapiens
cagtgcagtagtgggcgagcctggc

SEQ ID NO: 26737 - DNA, 25 bp, Homo sapiens
gacaagccaaggtggtcctgaagag

SEQ ID NO: 26738 - DNA, 25 bp, Homo sapiens
gacttccaggtcggacaagccaagg

SEQ ID NO: 26739 - DNA, 25 bp, Homo sapiens
gaggaccattattatgaaggtggca

SEQ ID NO: 26740 - DNA, 25 bp, Homo sapiens
gctgctgaagatgtttggtatcgac

SEQ ID NO: 26741 - DNA, 25 bp, Homo sapiens
ggatgaccaggtgaccgttatcggg

SEQ ID NO: 26742 - DNA, 25 bp, Homo sapiens
tgaccgttatcggggctggggtgac

SEQ ID NO: 26743 - DNA, 25 bp, Homo sapiens
tggtgaggctgtgtccagtgcagta

SEQ ID NO: 26744 - DNA, 25 bp, Homo sapiens
agaatcttccatatttatacagcag

SEQ ID NO: 26745 - DNA, 25 bp, Homo sapiens
agagaagctgtaggactgtttgtga

SEQ ID NO: 26746 - DNA, 25 bp, Homo sapiens
agcagtaacgggtagcagcagatgt

SEQ ID NO: 26747 - DNA, 25 bp, Homo sapiens
cccctcgttccagagctgagatggc

SEQ ID NO: 26748 - DNA, 25 bp, Homo sapiens
gagctgagatggcataggccttagc

SEQ ID NO: 26749 - DNA, 25 bp, Homo sapiens
gcagcagatgtagtttcagacttgg

SEQ ID NO: 26750 - DNA, 25 bp, Homo sapiens
ggcataggccttagcagtaacgggt

SEQ ID NO: 26751 - DNA, 25 bp, Homo sapiens
ggccttagcagtaacgggtagcagc

SEQ ID NO: 26752 - DNA, 25 bp, Homo sapiens
ggtagcagcagatgtagtttcagac

SEQ ID NO: 26753 - DNA, 25 bp, Homo sapiens
gtttcagacttggagtaaaactgta

SEQ ID NO: 26754 - DNA, 25 bp, Homo sapiens
tccatatttatacagcagagaagct

SEQ ID NO: 26755 - DNA, 25 bp, Homo sapiens
aagaagccactgatgctattgggca

SEQ ID NO: 26756 - DNA, 25 bp, Homo sapiens
acgggctgaagtcttgtgtcattgt

SEQ ID NO: 26757 - DNA, 25 bp, Homo sapiens
cacggccaacagaccgatgggtgct

SEQ ID NO: 26758 - DNA, 25 bp, Homo sapiens
ccctgcggagagtgctggagtgcct

SEQ ID NO: 26759 - DNA, 25 bp, Homo sapiens
ctggcgtcgggcatcgtgatgccag

SEQ ID NO: 26760 - DNA, 25 bp, Homo sapiens
gaagatatcacacagagtgcgcagc

SEQ ID NO: 26761 - DNA, 25 bp, Homo sapiens
ggttctggcatttatgacccttgtg

SEQ ID NO: 26762 - DNA, 25 bp, Homo sapiens
gtcattgtgatccgggtcttgaggg

SEQ ID NO: 26763 - DNA, 25 bp, Homo sapiens
gtggactacaccgttcagatcccac

SEQ ID NO: 26764 - DNA, 25 bp, Homo sapiens
tccaggccagagccaacgggctgaa

SEQ ID NO: 26765 - DNA, 25 bp, Homo sapiens
ttacgcccatgaaacgcccaatgga

SEQ ID NO: 26766 - DNA, 25 bp, Homo sapiens
aaatcatgaatgtggtctgcagaca

SEQ ID NO: 26767 - DNA, 25 bp, Homo sapiens
aacaccgttattagctggtactttg

SEQ ID NO: 26768 - DNA, 25 bp, Homo sapiens
aattgcactgtacttttcactccag

SEQ ID NO: 26769 - DNA, 25 bp, Homo sapiens
acgttgtaacggtggggcatctgtg

SEQ ID NO: 26770 - DNA, 25 bp, Homo sapiens
agatgtccctttcataatatatgca

SEQ ID NO: 26771 - DNA, 25 bp, Homo sapiens
agctggtactttggtgatttctatt

SEQ ID NO: 26772 - DNA, 25 bp, Homo sapiens
cagagtgtttgtagctttcatttgc

SEQ ID NO: 26773 - DNA, 25 bp, Homo sapiens
ggtgatttctattactagtttttct

SEQ ID NO: 26774 - DNA, 25 bp, Homo sapiens
gtgcatgctagaatttgggacaggc

SEQ ID NO: 26775 - DNA, 25 bp, Homo sapiens
ttatctgctctatttctgtcttata

SEQ ID NO: 26776 - DNA, 25 bp, Homo sapiens
tttgttggtagatccatgtgcatgc

SEQ ID NO: 26777 - DNA, 25 bp, Homo sapiens
aggctatcttagcggcacagagacg

SEQ ID NO: 26778 - DNA, 25 bp, Homo sapiens
caagaacacggccaagctggaccgg

SEQ ID NO: 26779 - DNA, 25 bp, Homo sapiens
ccatggccgagagcgactgggacac

SEQ ID NO: 26780 - DNA, 25 bp, Homo sapiens
gaaggacctggccacgaaaatcaat

SEQ ID NO: 26781 - DNA, 25 bp, Homo sapiens
gagctgcaccatgacagggtgaccc

SEQ ID NO: 26782 - DNA, 25 bp, Homo sapiens
gcaaggggcttacgcagaaggacct

SEQ ID NO: 26783 - DNA, 25 bp, Homo sapiens
gcggactatgagagcggacgggcca

SEQ ID NO: 26784 - DNA, 25 bp, Homo sapiens
ggccatacccaataaccaggtgctt

SEQ ID NO: 26785 - DNA, 25 bp, Homo sapiens
ggtgcttggcaaaatcgagcgggcc

SEQ ID NO: 26786 - DNA, 25 bp, Homo sapiens
gtgatccagcaaggtcggcagagca

SEQ ID NO: 26787 - DNA, 25 bp, Homo sapiens
tgacggtgctgcgcaagaagggccc

SEQ ID NO: 26788 - DNA, 25 bp, Homo sapiens
aaacgcacttaggaactttgcctgt

SEQ ID NO: 26789 - DNA, 25 bp, Homo sapiens
aagtgaggactgttggctgattgga

SEQ ID NO: 26790 - DNA, 25 bp, Homo sapiens
acgaactgcgtgtgatggagaccaa

SEQ ID NO: 26791 - DNA, 25 bp, Homo sapiens
ccctccccaatcaagcctggagata

SEQ ID NO: 26792 - DNA, 25 bp, Homo sapiens
cgctttctctggatctggcaataga

SEQ ID NO: 26793 - DNA, 25 bp, Homo sapiens
gacaagtccagcatgaggagtcgac

SEQ ID NO: 26794 - DNA, 25 bp, Homo sapiens
gagaccaaacccgacaaggcagtgt

SEQ ID NO: 26795 - DNA, 25 bp, Homo sapiens
gtctgaccaccggggatgtgattgc

SEQ ID NO: 26796 - DNA, 25 bp, Homo sapiens
gtgtgacatgaacgtggactttgat

SEQ ID NO: 26797 - DNA, 25 bp, Homo sapiens
tcacgtccccttgtcaaaaaggttg

SEQ ID NO: 26798 - DNA, 25 bp, Homo sapiens
tgctcccctgggctacaaagaaccc

SEQ ID NO: 26799 - DNA, 25 bp, Homo sapiens
aagaagctagccttctgaacctcgc

SEQ ID NO: 26800 - DNA, 25 bp, Homo sapiens
aagtcactcaggtcatgggcattgt

SEQ ID NO: 26801 - DNA, 25 bp, Homo sapiens
caatgggaaactgactcgcctgtga

SEQ ID NO: 26802 - DNA, 25 bp, Homo sapiens
ccttccagggctgaccagtttgagt

SEQ ID NO: 26803 - DNA, 25 bp, Homo sapiens
cgctcttgctcacctgttgaggaag

SEQ ID NO: 26804 - DNA, 25 bp, Homo sapiens
cgtggcggcatctttaactggcctc

SEQ ID NO: 26805 - DNA, 25 bp, Homo sapiens
ctatgggggcctgctcatgaggctg

SEQ ID NO: 26806 - DNA, 25 bp, Homo sapiens
gaggctgcagggggatgccaacaac

SEQ ID NO: 26807 - DNA, 25 bp, Homo sapiens
gccaacaacctgcatggattcgagg

SEQ ID NO: 26808 - DNA, 25 bp, Homo sapiens
ggactccagagtttatctcctgatg

SEQ ID NO: 26809 - DNA, 25 bp, Homo sapiens
gggcattgttcaagcctgagtggca

SEQ ID NO: 26810 - DNA, 25 bp, Homo sapiens
agtgggcaattttgacctgtcctgc

SEQ ID NO: 26811 - DNA, 25 bp, Homo sapiens
agttccttgggattagctcttggcc

SEQ ID NO: 26812 - DNA, 25 bp, Homo sapiens
ccacttattctagggcacacaaaca

SEQ ID NO: 26813 - DNA, 25 bp, Homo sapiens
ctagggactctcttctagagccata

SEQ ID NO: 26814 - DNA, 25 bp, Homo sapiens
gaaggctgagtatggttcccaattt

SEQ ID NO: 26815 - DNA, 25 bp, Homo sapiens
gagactcttctgtcagggaaaacta

SEQ ID NO: 26816 - DNA, 25 bp, Homo sapiens
gcggaagtagggcaactcggtcctg

SEQ ID NO: 26817 - DNA, 25 bp, Homo sapiens
gcttagatgggaccacagtgggcaa

SEQ ID NO: 26818 - DNA, 25 bp, Homo sapiens
ggtcctgcgattattaatcccactc

SEQ ID NO: 26819 - DNA, 25 bp, Homo sapiens
tgtcctgcccttcttagcttgaagg

SEQ ID NO: 26820 - DNA, 25 bp, Homo sapiens
tttcttgctctccagagcccaaagg

SEQ ID NO: 26821 - DNA, 25 bp, Homo sapiens
aatgccagtctggtcagggaagtag

SEQ ID NO: 26822 - DNA, 25 bp, Homo sapiens
accatggggtgagtgtcctccaaga

SEQ ID NO: 26823 - DNA, 25 bp, Homo sapiens
ccaggaaggtgggacagccggcagg

SEQ ID NO: 26824 - DNA, 25 bp, Homo sapiens
gaattgctactgaaagctatcccag

SEQ ID NO: 26825 - DNA, 25 bp, Homo sapiens
gagctctttgtaaaccgcagtcaca

SEQ ID NO: 26826 - DNA, 25 bp, Homo sapiens
gattttaaccattcaacatgctgtt

SEQ ID NO: 26827 - DNA, 25 bp, Homo sapiens
gctatcccaggtgatacagagctct

SEQ ID NO: 26828 - DNA, 25 bp, Homo sapiens
gcttggaggcgagcattttcactgc

SEQ ID NO: 26829 - DNA, 25 bp, Homo sapiens
gtagggacattgtgtacctcagttg

SEQ ID NO: 26830 - DNA, 25 bp, Homo sapiens
gtgtacctcagttgtgtcacatgtg

SEQ ID NO: 26831 - DNA, 25 bp, Homo sapiens
ttcactgctaggacaagctcagctg

SEQ ID NO: 26832 - DNA, 25 bp, Homo sapiens
caaacacctacccagaatgtccagg

SEQ ID NO: 26833 - DNA, 25 bp, Homo sapiens
caagtagaacagaagcccgtttcct

SEQ ID NO: 26834 - DNA, 25 bp, Homo sapiens
cttcaagtaccgacatttctcacct

SEQ ID NO: 26835 - DNA, 25 bp, Homo sapiens
gaatgtccagggctttcattttcaa

SEQ ID NO: 26836 - DNA, 25 bp, Homo sapiens
gatgcaaagcagcctaactcttcaa

SEQ ID NO: 26837 - DNA, 25 bp, Homo sapiens
gcctaagggagttcgttcacagctg

SEQ ID NO: 26838 - DNA, 25 bp, Homo sapiens
ggatttcttaaatgtgcctcccagt

SEQ ID NO: 26839 - DNA, 25 bp, Homo sapiens
tccctccagaacatacacttacatc

SEQ ID NO: 26840 - DNA, 25 bp, Homo sapiens
tgaactactggctacgtggctacca

SEQ ID NO: 26841 - DNA, 25 bp, Homo sapiens
tgagaaggagaccttagcttccccg

SEQ ID NO: 26842 - DNA, 25 bp, Homo sapiens
tggaattggttctagacgctgggta

SEQ ID NO: 26843 - DNA, 25 bp, Homo sapiens
agtgcctctcccagaaactgagaca

SEQ ID NO: 26844 - DNA, 25 bp, Homo sapiens
attatgtctggctgcagcacactct

SEQ ID NO: 26845 - DNA, 25 bp, Homo sapiens
cactcctggatcttcacattgaact

SEQ ID NO: 26846 - DNA, 25 bp, Homo sapiens
cccagctggagacagcagcctctgg

SEQ ID NO: 26847 - DNA, 25 bp, Homo sapiens
gaaagaaacttatcctctcctacac

SEQ ID NO: 26848 - DNA, 25 bp, Homo sapiens
ggccaacatggtaaacgctgtccct

SEQ ID NO: 26849 - DNA, 25 bp, Homo sapiens
ggctgtgcacagttcaccgagaagc

SEQ ID NO: 26850 - DNA, 25 bp, Homo sapiens
gggagaatcatgcccttatctagca

SEQ ID NO: 26851 - DNA, 25 bp, Homo sapiens
tatgtggtgtcagagggcccagctg

SEQ ID NO: 26852 - DNA, 25 bp, Homo sapiens
tcttctggagcctgtgtactgcgga

SEQ ID NO: 26853 - DNA, 25 bp, Homo sapiens
tgctggagcagtctcacagctcacc

SEQ ID NO: 26854 - DNA, 25 bp, Homo sapiens
aactgacctacctgctgcagaactc

SEQ ID NO: 26855 - DNA, 25 bp, Homo sapiens
cacgtgccttaccggaacagcaaac

SEQ ID NO: 26856 - DNA, 25 bp, Homo sapiens
cagatttctggggagcactccagcc

SEQ ID NO: 26857 - DNA, 25 bp, Homo sapiens
cattaacagcagcctgtccacgctg

SEQ ID NO: 26858 - DNA, 25 bp, Homo sapiens
gcaccatgtcccagggctatcaaat

SEQ ID NO: 26859 - DNA, 25 bp, Homo sapiens
gcagaactctctgggtggtagtgct

SEQ ID NO: 26860 - DNA, 25 bp, Homo sapiens
gctttgcctccaaggtgaaccagtg

SEQ ID NO: 26861 - DNA, 25 bp, Homo sapiens
ggagggttgctggagggtgctttat

SEQ ID NO: 26862 - DNA, 25 bp, Homo sapiens
ggggctggttatcatggccctgagc

SEQ ID NO: 26863 - DNA, 25 bp, Homo sapiens
gtgtgtccctatgtctatgtatcgg

SEQ ID NO: 26864 - DNA, 25 bp, Homo sapiens
tggccgggagtgagcgacttgaccc

SEQ ID NO: 26865 - DNA, 25 bp, Homo sapiens
aaagcatatttacctcttgggagat

SEQ ID NO: 26866 - DNA, 25 bp, Homo sapiens
acaccaaccatattattcagggttc

SEQ ID NO: 26867 - DNA, 25 bp, Homo sapiens
acctcttgggagataggcactatgt

SEQ ID NO: 26868 - DNA, 25 bp, Homo sapiens
agaattgatggtgtccccaatgccc

SEQ ID NO: 26869 - DNA, 25 bp, Homo sapiens
atgatggcataaccattgctttaaa

SEQ ID NO: 26870 - DNA, 25 bp, Homo sapiens
gacccaaattaggtgcattttactt

SEQ ID NO: 26871 - DNA, 25 bp, Homo sapiens
gccatatgtgtggggtatcctactg

SEQ ID NO: 26872 - DNA, 25 bp, Homo sapiens
ggtcctgggtagtttacttgcttgc

SEQ ID NO: 26873 - DNA, 25 bp, Homo sapiens
tatcctactgatacacacgtattca

SEQ ID NO: 26874 - DNA, 25 bp, Homo sapiens
ttcagggttcctgccatatgtgtgg

SEQ ID NO: 26875 - DNA, 25 bp, Homo sapiens
tttctaagcctttctgggaaatcat

SEQ ID NO: 26876 - DNA, 25 bp, Homo sapiens
aagacccatttacatacagtagatt

SEQ ID NO: 26877 - DNA, 25 bp, Homo sapiens
aatctcttctgtaacctttattaat

SEQ ID NO: 26878 - DNA, 25 bp, Homo sapiens
acactggtcttatgtttcatttgga

SEQ ID NO: 26879 - DNA, 25 bp, Homo sapiens
agccctatcatactcactttttaag

SEQ ID NO: 26880 - DNA, 25 bp, Homo sapiens
attgcattgtcttgttaccagaaac

SEQ ID NO: 26881 - DNA, 25 bp, Homo sapiens
atttattcagtcatccagtttgcta

SEQ ID NO: 26882 - DNA, 25 bp, Homo sapiens
gaaagtcctatttcagtaagaccca

SEQ ID NO: 26883 - DNA, 25 bp, Homo sapiens
gcagagatcttttagtgtaacatac

SEQ ID NO: 26884 - DNA, 25 bp, Homo sapiens
ggaaaagtacagcaataatctcttc

SEQ ID NO: 26885 - DNA, 25 bp, Homo sapiens
gttggctagctgtacatgttttgaa

SEQ ID NO: 26886 - DNA, 25 bp, Homo sapiens
gttgttgtagccctatcatactcac

SEQ ID NO: 26887 - DNA, 25 bp, Homo sapiens
acaagaaacttgtctatgtacctta

SEQ ID NO: 26888 - DNA, 25 bp, Homo sapiens
acagtagtctgacgtatttcccctt

SEQ ID NO: 26889 - DNA, 25 bp, Homo sapiens
agctttgtttgcttcctacaaatac

SEQ ID NO: 26890 - DNA, 25 bp, Homo sapiens
agggatgtgttagagttactgtgga

SEQ ID NO: 26891 - DNA, 25 bp, Homo sapiens
atgcttattccttaagggatgtgtt

SEQ ID NO: 26892 - DNA, 25 bp, Homo sapiens
gcttcctacaaatacatgcttattc

SEQ ID NO: 26893 - DNA, 25 bp, Homo sapiens
gtaagcccagttgctgtatctgaac

SEQ ID NO: 26894 - DNA, 25 bp, Homo sapiens
taataaacgagatgcagaacccttg

SEQ ID NO: 26895 - DNA, 25 bp, Homo sapiens
tcatcctgtgaaagtggtttctcta

SEQ ID NO: 26896 - DNA, 25 bp, Homo sapiens
tcccctagtaagcccagttgctgta

SEQ ID NO: 26897 - DNA, 25 bp, Homo sapiens
ttgtaatatactctaaacctgttat

SEQ ID NO: 26898 - DNA, 25 bp, Homo sapiens
aatgcagcctgaggtaagcaggaat

SEQ ID NO: 26899 - DNA, 25 bp, Homo sapiens
acatgtattttcttgtgatatgctc

SEQ ID NO: 26900 - DNA, 25 bp, Homo sapiens
agatttttttagtgcacaatacctt

SEQ ID NO: 26901 - DNA, 25 bp, Homo sapiens
agtgcacaataccttgtacacagta

SEQ ID NO: 26902 - DNA, 25 bp, Homo sapiens
gaatgtaaacggagttcaaggcctt

SEQ ID NO: 26903 - DNA, 25 bp, Homo sapiens
gaatgttttatctctgagacataga

SEQ ID NO: 26904 - DNA, 25 bp, Homo sapiens
ggagttcaaggccttaacatttttg

SEQ ID NO: 26905 - DNA, 25 bp, Homo sapiens
gtatctgaaaaatcttgtccaattt

SEQ ID NO: 26906 - DNA, 25 bp, Homo sapiens
tgatatgctcatttgtctttagtta

SEQ ID NO: 26907 - DNA, 25 bp, Homo sapiens
ttgagcactgctactactgtcatta

SEQ ID NO: 26908 - DNA, 25 bp, Homo sapiens
ttgtctttagttatttatgttctta

SEQ ID NO: 26909 - DNA, 25 bp, Homo sapiens
aataccccctcatgaaataactgtt

SEQ ID NO: 26910 - DNA, 25 bp, Homo sapiens
acgccactgaggaacaggatccact

SEQ ID NO: 26911 - DNA, 25 bp, Homo sapiens
aggatccactttgaacagtccgcta

SEQ ID NO: 26912 - DNA, 25 bp, Homo sapiens
atagctacactcacaaaaatacccc

SEQ ID NO: 26913 - DNA, 25 bp, Homo sapiens
atgaaataactgttctcttggatgg

SEQ ID NO: 26914 - DNA, 25 bp, Homo sapiens
atttctaagaaacgccactgaggaa

SEQ ID NO: 26915 - DNA, 25 bp, Homo sapiens
cacaaaaataccccctcatgaaata

SEQ ID NO: 26916 - DNA, 25 bp, Homo sapiens
gttctcttggatggttaccttattt

SEQ ID NO: 26917 - DNA, 25 bp, Homo sapiens
tgaacagtccgctaaagctatcaaa

SEQ ID NO: 26918 - DNA, 25 bp, Homo sapiens
ttgagttgagttgtagtactttata

SEQ ID NO: 26919 - DNA, 25 bp, Homo sapiens
ttggatggttaccttatttctaaga

SEQ ID NO: 26920 - DNA, 25 bp, Homo sapiens
aagcccctaggaatctgcctgataa

SEQ ID NO: 26921 - DNA, 25 bp, Homo sapiens
aatgagacagaaaacgcccactcct

SEQ ID NO: 26922 - DNA, 25 bp, Homo sapiens
gaagcttttttgcctcagagcatac

SEQ ID NO: 26923 - DNA, 25 bp, Homo sapiens
gatccttcaaataacttcaggctcc

SEQ ID NO: 26924 - DNA, 25 bp, Homo sapiens
taaggaacagcttggcgctcaacaa

SEQ ID NO: 26925 - DNA, 25 bp, Homo sapiens
ttatgtttggctgcagcacactctg

SEQ ID NO: 26926 - DNA, 25 bp, Homo sapiens
aagcctgttgattttcacttgctgt

SEQ ID NO: 26927 - DNA, 25 bp, Homo sapiens
aagtcaaggaccaagttcagatact

SEQ ID NO: 26928 - DNA, 25 bp, Homo sapiens
acttgctgtgcatttattcatccat

SEQ ID NO: 26929 - DNA, 25 bp, Homo sapiens
agaccatggacatcaccaagttcat

SEQ ID NO: 26930 - DNA, 25 bp, Homo sapiens
attccattgcctcaatgctgagaac

SEQ ID NO: 26931 - DNA, 25 bp, Homo sapiens
caaagtggaaagtctcagcatatgg

SEQ ID NO: 26932 - DNA, 25 bp, Homo sapiens
ccaagttcatgtgctgggctggaaa

SEQ ID NO: 26933 - DNA, 25 bp, Homo sapiens
ctcagcatatggaaacaaggccttg

SEQ ID NO: 26934 - DNA, 25 bp, Homo sapiens
cttgccctgagacggggattataag

SEQ ID NO: 26935 - DNA, 25 bp, Homo sapiens
gttcatgtgctgggctggaaagaaa

SEQ ID NO: 26936 - DNA, 25 bp, Homo sapiens
tgcctcaatgctgagaacagtgcct

SEQ ID NO: 26937 - DNA, 25 bp, Homo sapiens
aatgaccccagctttgaggacatga

SEQ ID NO: 26938 - DNA, 25 bp, Homo sapiens
accgcgctgcggatcaagaagacac

SEQ ID NO: 26939 - DNA, 25 bp, Homo sapiens
agatccgcacggactgctttgagtc

SEQ ID NO: 26940 - DNA, 25 bp, Homo sapiens
attacctggacatcggcaacaaccc

SEQ ID NO: 26941 - DNA, 25 bp, Homo sapiens
caagtggactgacatctgggccttt

SEQ ID NO: 26942 - DNA, 25 bp, Homo sapiens
ctctcaggcctagctcagatgatgc

SEQ ID NO: 26943 - DNA, 25 bp, Homo sapiens
ctggtgctgtgggagattgcccgcc

SEQ ID NO: 26944 - DNA, 25 bp, Homo sapiens
gagagtgggcaccaagcggtacatg

SEQ ID NO: 26945 - DNA, 25 bp, Homo sapiens
gatgcactcacagggcagcgattac

SEQ ID NO: 26946 - DNA, 25 bp, Homo sapiens
ggactatagaccacccttctatgat

SEQ ID NO: 26947 - DNA, 25 bp, Homo sapiens
tatgatgtggtgcccaatgacccca

SEQ ID NO: 26948 - DNA, 25 bp, Homo sapiens
aaggtcagcacaaaggccttcacct

SEQ ID NO: 26949 - DNA, 25 bp, Homo sapiens
caaacgttgtcacttttctcttgtt

SEQ ID NO: 26950 - DNA, 25 bp, Homo sapiens
cagatctggggttgggtcatgacac

SEQ ID NO: 26951 - DNA, 25 bp, Homo sapiens
gaagacctcctggtaggatctgtcc

SEQ ID NO: 26952 - DNA, 25 bp, Homo sapiens
gatggagaaccactctgtccagatc

SEQ ID NO: 26953 - DNA, 25 bp, Homo sapiens
ggctcattgacttttccattacatc

SEQ ID NO: 26954 - DNA, 25 bp, Homo sapiens
gggccagtccatttttggaggtcac

SEQ ID NO: 26955 - DNA, 25 bp, Homo sapiens
gtcatgacaccagctaccaatttta

SEQ ID NO: 26956 - DNA, 25 bp, Homo sapiens
taatctctaattttttggcgcctct

SEQ ID NO: 26957 - DNA, 25 bp, Homo sapiens
tagctcaggttggcccagtttgggc

SEQ ID NO: 26958 - DNA, 25 bp, Homo sapiens
ttttggcgcctctttcattgaatga

SEQ ID NO: 26959 - DNA, 25 bp, Homo sapiens
aatatatcattatctttgctgttat

SEQ ID NO: 26960 - DNA, 25 bp, Homo sapiens
ataatcacagttgtgttcctgacac

SEQ ID NO: 26961 - DNA, 25 bp, Homo sapiens
atatttcttttaatgggcacaaaat

SEQ ID NO: 26962 - DNA, 25 bp, Homo sapiens
cctttctaaccttcacgattaactg

SEQ ID NO: 26963 - DNA, 25 bp, Homo sapiens
gacattcacctgtatatttctttta

SEQ ID NO: 26964 - DNA, 25 bp, Homo sapiens
gagggatgagacagacattcacctg

SEQ ID NO: 26965 - DNA, 25 bp, Homo sapiens
gattaactgtgaaatgtacgtcatt

SEQ ID NO: 26966 - DNA, 25 bp, Homo sapiens
gtacgtcatttgtgcaagaccgttt

SEQ ID NO: 26967 - DNA, 25 bp, Homo sapiens
gttactaaaattatgttactgtatt

SEQ ID NO: 26968 - DNA, 25 bp, Homo sapiens
tagtttgttcttcagattgataggg

SEQ ID NO: 26969 - DNA, 25 bp, Homo sapiens
tgtgcaagaccgtttgtccacttca

SEQ ID NO: 26970 - DNA, 25 bp, Homo sapiens
aaagtggccagagattgggctgcct

SEQ ID NO: 26971 - DNA, 25 bp, Homo sapiens
actcccctcataacaatagacacat

SEQ ID NO: 26972 - DNA, 25 bp, Homo sapiens
aggagccactgccaaactcaaggct

SEQ ID NO: 26973 - DNA, 25 bp, Homo sapiens
cttggatggctgagggtggtcacac

SEQ ID NO: 26974 - DNA, 25 bp, Homo sapiens
gactcccctcataacaatagacaca

SEQ ID NO: 26975 - DNA, 25 bp, Homo sapiens
gagccactgccaaactcaaggctcc

SEQ ID NO: 26976 - DNA, 25 bp, Homo sapiens
gattgggctgcctgtgatacccatc

SEQ ID NO: 26977 - DNA, 25 bp, Homo sapiens
ggactcccctcataacaatagacac

SEQ ID NO: 26978 - DNA, 25 bp, Homo sapiens
ggagccactgccaaactcaaggctc

SEQ ID NO: 26979 - DNA, 25 bp, Homo sapiens
tcccctcataacaatagacacatgt

SEQ ID NO: 26980 - DNA, 25 bp, Homo sapiens
ttggatggctgagggtggtcacacc

SEQ ID NO: 26981 - DNA, 25 bp, Homo sapiens
acaagggaggagactgcaccccact

SEQ ID NO: 26982 - DNA, 25 bp, Homo sapiens
atgacaacaacctggcttacctgga

SEQ ID NO: 26983 - DNA, 25 bp, Homo sapiens
ctgtgcgtggagtccccaataaacc

SEQ ID NO: 26984 - DNA, 25 bp, Homo sapiens
gaggccattcacaacttcgtggagg

SEQ ID NO: 26985 - DNA, 25 bp, Homo sapiens
gccgttgtcgtgtgatgccataagc

SEQ ID NO: 26986 - DNA, 25 bp, Homo sapiens
tggagtgagggcaggcgagccccac

SEQ ID NO: 26987 - DNA, 25 bp, Homo sapiens
aatagattccacaacctggtttgcc

SEQ ID NO: 26988 - DNA, 25 bp, Homo sapiens
acttatagttgtgatcctgcacctg

SEQ ID NO: 26989 - DNA, 25 bp, Homo sapiens
agtgtggagtcgtgctgctccagag

SEQ ID NO: 26990 - DNA, 25 bp, Homo sapiens
gcacctggaccagatccattttcac

SEQ ID NO: 26991 - DNA, 25 bp, Homo sapiens
ggagctgaatatgccacttaccaga

SEQ ID NO: 26992 - DNA, 25 bp, Homo sapiens
ggcagcgacacaattgtctgtgaca

SEQ ID NO: 26993 - DNA, 25 bp, Homo sapiens
gtaacagtacttgggatcccccagt

SEQ ID NO: 26994 - DNA, 25 bp, Homo sapiens
gtcctaggcctacttacaagcctcc

SEQ ID NO: 26995 - DNA, 25 bp, Homo sapiens
gtttttacctcgatggcagcgacac

SEQ ID NO: 26996 - DNA, 25 bp, Homo sapiens
tacaagcctccagtctcaaattatc

SEQ ID NO: 26997 - DNA, 25 bp, Homo sapiens
taccagactaaatcaaccactccag

SEQ ID NO: 26998 - DNA, 25 bp, Homo sapiens
aaatggccttaagtgtattcctgac

SEQ ID NO: 26999 - DNA, 25 bp, Homo sapiens
aacactactgcctaacacaaatctg

SEQ ID NO: 27000 - DNA, 25 bp, Homo sapiens
acaggctgtgccttattttgataat

SEQ ID NO: 27001 - DNA, 25 bp, Homo sapiens
actcaaggtgccccttcagaattaa

SEQ ID NO: 27002 - DNA, 25 bp, Homo sapiens
atgaccaaagcttctattttgccaa

SEQ ID NO: 27003 - DNA, 25 bp, Homo sapiens
atttccaacttatgccttccagaaa

SEQ ID NO: 27004 - DNA, 25 bp, Homo sapiens
ctgattccctagaagagaaccctct

SEQ ID NO: 27005 - DNA, 25 bp, Homo sapiens
gaaccctctactttttgtaagcact

SEQ ID NO: 27006 - DNA, 25 bp, Homo sapiens
gttagttacccttgtcatttggcat

SEQ ID NO: 27007 - DNA, 25 bp, Homo sapiens
taagcactactgactctcgctgtat

SEQ ID NO: 27008 - DNA, 25 bp, Homo sapiens
ttgccattactcccagttagttacc

SEQ ID NO: 27009 - DNA, 25 bp, Homo sapiens
gcacttggtctttgctgacagcttg

SEQ ID NO: 27010 - DNA, 25 bp, Homo sapiens
gctgagctgcagttttacctagtgg

SEQ ID NO: 27011 - DNA, 25 bp, Homo sapiens
gtgagtttcatttatgtctattctt

SEQ ID NO: 27012 - DNA, 25 bp, Homo sapiens
gtgattcatctggggccttatttcc

SEQ ID NO: 27013 - DNA, 25 bp, Homo sapiens
gtgcgtgatggtggacagccgccac

SEQ ID NO: 27014 - DNA, 25 bp, Homo sapiens
tagtggtggccttggccttgatctc

SEQ ID NO: 27015 - DNA, 25 bp, Homo sapiens
tcaggggactttgccttattcctac

SEQ ID NO: 27016 - DNA, 25 bp, Homo sapiens
tcattacccacccaattttctgtat

SEQ ID NO: 27017 - DNA, 25 bp, Homo sapiens
tcccatcctgagttggtgagtttca

SEQ ID NO: 27018 - DNA, 25 bp, Homo sapiens
tgtaattccagcgagtcgacttccc

SEQ ID NO: 27019 - DNA, 25 bp, Homo sapiens
tgtcaagtctggacctgtggttccc

SEQ ID NO: 27020 - DNA, 25 bp, Homo sapiens
acgcccctgctaacgggaatgctaa

SEQ ID NO: 27021 - DNA, 25 bp, Homo sapiens
ctacgggcaagcgggcagctgaaga

SEQ ID NO: 27022 - DNA, 25 bp, Homo sapiens
gaaaatggaagagacgcccctgcta

SEQ ID NO: 27023 - DNA, 25 bp, Homo sapiens
gaggatgacgatgtcgataccaaga

SEQ ID NO: 27024 - DNA, 25 bp, Homo sapiens
gataccaagaagcagaagaccgacg

SEQ ID NO: 27025 - DNA, 25 bp, Homo sapiens
gcaggaggctgacaatgaggtagac

SEQ ID NO: 27026 - DNA, 25 bp, Homo sapiens
aagaatgcgattcacacctttgtgc

SEQ ID NO: 27027 - DNA, 25 bp, Homo sapiens
cgcctgggacccaattatcttcata

SEQ ID NO: 27028 - DNA, 25 bp, Homo sapiens
gctttggtgctccggaacaacagcc

SEQ ID NO: 27029 - DNA, 25 bp, Homo sapiens
ggcattgaggccagtcctgacaaaa

SEQ ID NO: 27030 - DNA, 25 bp, Homo sapiens
ggcccgatgtgcatgcaggacaatc

SEQ ID NO: 27031 - DNA, 25 bp, Homo sapiens
ggttgaacagatagccttcgaccca

SEQ ID NO: 27032 - DNA, 25 bp, Homo sapiens
gtgcggagattcaacactgccaatg

SEQ ID NO: 27033 - DNA, 25 bp, Homo sapiens
taacgttactcaggtgcgggcattc

SEQ ID NO: 27034 - DNA, 25 bp, Homo sapiens
tcaagaacttcactgaggtccaccc

SEQ ID NO: 27035 - DNA, 25 bp, Homo sapiens
tcatatacctgtgaactgtccctac

SEQ ID NO: 27036 - DNA, 25 bp, Homo sapiens
tgactacgggagccacatccaggct

SEQ ID NO: 27037 - DNA, 25 bp, Homo sapiens
aaataactctctgctaggtccttgc

SEQ ID NO: 27038 - DNA, 25 bp, Homo sapiens
aggtccttgcttatatggcaaccac

SEQ ID NO: 27039 - DNA, 25 bp, Homo sapiens
atgtctctttattcctgcttagtgg

SEQ ID NO: 27040 - DNA, 25 bp, Homo sapiens
ctttgctccaagactcttaagccca

SEQ ID NO: 27041 - DNA, 25 bp, Homo sapiens
gacacgttttgtttagagctacttt

SEQ ID NO: 27042 - DNA, 25 bp, Homo sapiens
gcctccatcagcttcttatttagta

SEQ ID NO: 27043 - DNA, 25 bp, Homo sapiens
gtatttcatatgcccattagcccta

SEQ ID NO: 27044 - DNA, 25 bp, Homo sapiens
gtcagagcattttaactagccactc

SEQ ID NO: 27045 - DNA, 25 bp, Homo sapiens
tagccctatgcttcagatgacacgt

SEQ ID NO: 27046 - DNA, 25 bp, Homo sapiens
tggcaaccactgctagaaccctaaa

SEQ ID NO: 27047 - DNA, 25 bp, Homo sapiens
ttctctttttactcatcagctgcaa

SEQ ID NO: 27048 - DNA, 25 bp, Homo sapiens
ccacccatttccaccatggtatggt

SEQ ID NO: 27049 - DNA, 25 bp, Homo sapiens
ccactaattgagtttctggctcccc

SEQ ID NO: 27050 - DNA, 25 bp, Homo sapiens
ccccaccaagatcatttcatccagt

SEQ ID NO: 27051 - DNA, 25 bp, Homo sapiens
ctaggctgactggatttgagaacaa

SEQ ID NO: 27052 - DNA, 25 bp, Homo sapiens
gagcttcagtttccaagtgaatttc

SEQ ID NO: 27053 - DNA, 25 bp, Homo sapiens
gtttgcctggaattgttctgtacct

SEQ ID NO: 27054 - DNA, 25 bp, Homo sapiens
gttttgttcattcatgagggccgac

SEQ ID NO: 27055 - DNA, 25 bp, Homo sapiens
tcagcttaagggaggcttcttgcct

SEQ ID NO: 27056 - DNA, 25 bp, Homo sapiens
tcctggggttgtaagttttgttcat

SEQ ID NO: 27057 - DNA, 25 bp, Homo sapiens
ttacactaactctgtacctaccatc

SEQ ID NO: 27058 - DNA, 25 bp, Homo sapiens
ttctgtacctctttgtagcacgtag

SEQ ID NO: 27059 - DNA, 25 bp, Homo sapiens
atcaaagaggccattctacccagtc

SEQ ID NO: 27060 - DNA, 25 bp, Homo sapiens
atggggaggggccatggcttggcat

SEQ ID NO: 27061 - DNA, 25 bp, Homo sapiens
cagaagatatactgacccccatgca

SEQ ID NO: 27062 - DNA, 25 bp, Homo sapiens
cctgggcctctatgccaggtgggga

SEQ ID NO: 27063 - DNA, 25 bp, Homo sapiens
gaacggtgatttctgtccaagtgca

SEQ ID NO: 27064 - DNA, 25 bp, Homo sapiens
gaggctgtaacctcagagggcacca

SEQ ID NO: 27065 - DNA, 25 bp, Homo sapiens
ggcagggcagggtctgtgaagctta

SEQ ID NO: 27066 - DNA, 25 bp, Homo sapiens
gggcaaacgcttagggatcctggtt

SEQ ID NO: 27067 - DNA, 25 bp, Homo sapiens
gtccaagtgcagatttccgtttgaa

SEQ ID NO: 27068 - DNA, 25 bp, Homo sapiens
gtcccttccaaggtgggtcaggagg

SEQ ID NO: 27069 - DNA, 25 bp, Homo sapiens
ttctctgggcaggtggccatgggga

SEQ ID NO: 27070 - DNA, 25 bp, Homo sapiens
aaggaacctgccttagctcagtttc

SEQ ID NO: 27071 - DNA, 25 bp, Homo sapiens
actcctgattggtccgaagggccac

SEQ ID NO: 27072 - DNA, 25 bp, Homo sapiens
cacttctttcaccttgaacttggat

SEQ ID NO: 27073 - DNA, 25 bp, Homo sapiens
caggaggcaggccatgacctcatgg

SEQ ID NO: 27074 - DNA, 25 bp, Homo sapiens
ccacgtgatctcccagatagcacag

SEQ ID NO: 27075 - DNA, 25 bp, Homo sapiens
ctgtgaagctcctcaagtgaccacc

SEQ ID NO: 27076 - DNA, 25 bp, Homo sapiens
cttggataagaactcgtgtctcctg

SEQ ID NO: 27077 - DNA, 25 bp, Homo sapiens
gtgtctcctgagtgaggtagcgcct

SEQ ID NO: 27078 - DNA, 25 bp, Homo sapiens
tagctatgggcccagagtttctccc

SEQ ID NO: 27079 - DNA, 25 bp, Homo sapiens
tgttgctagcagggagatttctctt

SEQ ID NO: 27080 - DNA, 25 bp, Homo sapiens
ttggtgggagcaatgtcaccctgcc

SEQ ID NO: 27081 - DNA, 25 bp, Homo sapiens
actctgctcagccctgtaacagggt

SEQ ID NO: 27082 - DNA, 25 bp, Homo sapiens
aggaagagctttgacttgtccctgt

SEQ ID NO: 27083 - DNA, 25 bp, Homo sapiens
attatgatcatctaccaccaactct

SEQ ID NO: 27084 - DNA, 25 bp, Homo sapiens
gagcctaacactatcctgtaattca

SEQ ID NO: 27085 - DNA, 25 bp, Homo sapiens
gtccctgtctatacattctctgtat

SEQ ID NO: 27086 - DNA, 25 bp, Homo sapiens
gtttttcagtgttcagccatgtcag

SEQ ID NO: 27087 - DNA, 25 bp, Homo sapiens
taacctttgtaatgttcttcaccac

SEQ ID NO: 27088 - DNA, 25 bp, Homo sapiens
tcttcaccacagacaccttcttgtg

SEQ ID NO: 27089 - DNA, 25 bp, Homo sapiens
ttcattgcctttttcacctaagcat

SEQ ID NO: 27090 - DNA, 25 bp, Homo sapiens
ttctctgtatcttttgggggtaact

SEQ ID NO: 27091 - DNA, 25 bp, Homo sapiens
ttttacttacccatgtgagcctaac

SEQ ID NO: 27092 - DNA, 25 bp, Homo sapiens
aatagtgtctactatctcaaccctc

SEQ ID NO: 27093 - DNA, 25 bp, Homo sapiens
attgctttgcatggtctcatttgag

SEQ ID NO: 27094 - DNA, 25 bp, Homo sapiens
caaccctccaaaatttgcagagtgt

SEQ ID NO: 27095 - DNA, 25 bp, Homo sapiens
caattttctgtcaatcacactgttg

SEQ ID NO: 27096 - DNA, 25 bp, Homo sapiens
cctggaacccagtctagcaaaatga

SEQ ID NO: 27097 - DNA, 25 bp, Homo sapiens
gacattttctgaccaggcacatgcc

SEQ ID NO: 27098 - DNA, 25 bp, Homo sapiens
gatgtaagaatcctgacttttttat

SEQ ID NO: 27099 - DNA, 25 bp, Homo sapiens
gcagagtgttgggactgtcatttgt

SEQ ID NO: 27100 - DNA, 25 bp, Homo sapiens
ggccctagggagatttatttctgtt

SEQ ID NO: 27101 - DNA, 25 bp, Homo sapiens
gttccatgtgcctcccaaataaaaa

SEQ ID NO: 27102 - DNA, 25 bp, Homo sapiens
ttacatgaggggttcttcacgattc

SEQ ID NO: 27103 - DNA, 25 bp, Homo sapiens
acagtgagtgaatatacccccatcc

SEQ ID NO: 27104 - DNA, 25 bp, Homo sapiens
acttgtcagttactgatgtctgtgg

SEQ ID NO: 27105 - DNA, 25 bp, Homo sapiens
ataaaacttcacactttgtaccatt

SEQ ID NO: 27106 - DNA, 25 bp, Homo sapiens
cccatccccaagaacactttataca

SEQ ID NO: 27107 - DNA, 25 bp, Homo sapiens
gacaaaactagttcactcactgctt

SEQ ID NO: 27108 - DNA, 25 bp, Homo sapiens
gcacatcagaaaaccttgtctggac

SEQ ID NO: 27109 - DNA, 25 bp, Homo sapiens
gtacacctgccctaaggagaaaata

SEQ ID NO: 27110 - DNA, 25 bp, Homo sapiens
gtggctttatcactttaaatcttta

SEQ ID NO: 27111 - DNA, 25 bp, Homo sapiens
tactttcccaagcatgtcttagaat

SEQ ID NO: 27112 - DNA, 25 bp, Homo sapiens
tatgtaatgtacacctgccctaagg

SEQ ID NO: 27113 - DNA, 25 bp, Homo sapiens
ttgcatgttgaagcctgtataaaac

SEQ ID NO: 27114 - DNA, 25 bp, Homo sapiens
aagcccagtttgtctttcagaaggt

SEQ ID NO: 27115 - DNA, 25 bp, Homo sapiens
ataatctcctaaatcactgacgttg

SEQ ID NO: 27116 - DNA, 25 bp, Homo sapiens
cagaagagtgggtctcctatttcct

SEQ ID NO: 27117 - DNA, 25 bp, Homo sapiens
cctatttcctcagaagagcggcggc

SEQ ID NO: 27118 - DNA, 25 bp, Homo sapiens
gaatccttggcacttcagaaacagc

SEQ ID NO: 27119 - DNA, 25 bp, Homo sapiens
gacgattggtcctctgatgaattct

SEQ ID NO: 27120 - DNA, 25 bp, Homo sapiens
gatgcaagcaaagctcgcagcgcaa

SEQ ID NO: 27121 - DNA, 25 bp, Homo sapiens
gcagctgctctccatagaagaatcc

SEQ ID NO: 27122 - DNA, 25 bp, Homo sapiens
ggcgcagggataagcagcatcttga

SEQ ID NO: 27123 - DNA, 25 bp, Homo sapiens
tgatgacatcacagcagctcggctt

SEQ ID NO: 27124 - DNA, 25 bp, Homo sapiens
tgattcatctagtcattgccagaag

SEQ ID NO: 27125 - DNA, 25 bp, Homo sapiens
aagagcctctactatgaacagcagc

SEQ ID NO: 27126 - DNA, 25 bp, Homo sapiens
ataaactacgcaaagagcctctact

SEQ ID NO: 27127 - DNA, 25 bp, Homo sapiens
gaacagggtctgtgctatgtgtaaa

SEQ ID NO: 27128 - DNA, 25 bp, Homo sapiens
gactcagcgaaaaccgagagcagct

SEQ ID NO: 27129 - DNA, 25 bp, Homo sapiens
gaggcagaaccggagtcgggtttgg

SEQ ID NO: 27130 - DNA, 25 bp, Homo sapiens
gaggtccttgctgtcaagttgtcac

SEQ ID NO: 27131 - DNA, 25 bp, Homo sapiens
gcccagctctcagctgacgatggag

SEQ ID NO: 27132 - DNA, 25 bp, Homo sapiens
ggtccatgtgaaatctgaggtcctt

SEQ ID NO: 27133 - DNA, 25 bp, Homo sapiens
gtgaggcagggagttattttagatt

SEQ ID NO: 27134 - DNA, 25 bp, Homo sapiens
taatttttagattgccctgtatttt

SEQ ID NO: 27135 - DNA, 25 bp, Homo sapiens
tgaagccccgctgctgagatgggcg

SEQ ID NO: 27136 - DNA, 25 bp, Homo sapiens
acagtcatctttaacagcttacact

SEQ ID NO: 27137 - DNA, 25 bp, Homo sapiens
actcacattttctcagtgtgccctt

SEQ ID NO: 27138 - DNA, 25 bp, Homo sapiens
agccataattccaccatcatacaga

SEQ ID NO: 27139 - DNA, 25 bp, Homo sapiens
gcacagtggacagtctttgatcatc

SEQ ID NO: 27140 - DNA, 25 bp, Homo sapiens
gtatgtgtggtttcagttctgtgta

SEQ ID NO: 27141 - DNA, 25 bp, Homo sapiens
gtgatcctttgatggctttttttgc

SEQ ID NO: 27142 - DNA, 25 bp, Homo sapiens
ttaacactaattatcacgtctgaca

SEQ ID NO: 27143 - DNA, 25 bp, Homo sapiens
ttatctgccatgtccatagccataa

SEQ ID NO: 27144 - DNA, 25 bp, Homo sapiens
ttggtgttttatctcctgtgatcct

SEQ ID NO: 27145 - DNA, 25 bp, Homo sapiens
tttccatatttaacctatttccaca

SEQ ID NO: 27146 - DNA, 25 bp, Homo sapiens
ttttgcctaccatttcacagaggtt

SEQ ID NO: 27147 - DNA, 25 bp, Homo sapiens
aattgtggatttttttagatgcttc

SEQ ID NO: 27148 - DNA, 25 bp, Homo sapiens
attcttgcatctggccttagaaatg

SEQ ID NO: 27149 - DNA, 25 bp, Homo sapiens
attttatggcatgtcttctatttaa

SEQ ID NO: 27150 - DNA, 25 bp, Homo sapiens
gaagttatattctcaagtttatttt

SEQ ID NO: 27151 - DNA, 25 bp, Homo sapiens
gatagtacatgtgttgttcaaacct

SEQ ID NO: 27152 - DNA, 25 bp, Homo sapiens
ggaatggtctctttgatttaaaatg

SEQ ID NO: 27153 - DNA, 25 bp, Homo sapiens
gtggaattcctcacagattaaccag

SEQ ID NO: 27154 - DNA, 25 bp, Homo sapiens
taaagtattgtcccctctttttgca

SEQ ID NO: 27155 - DNA, 25 bp, Homo sapiens
tcccctctttttgcactaattgtgg

SEQ ID NO: 27156 - DNA, 25 bp, Homo sapiens
ttggcatttagtaaccttaattctt

SEQ ID NO: 27157 - DNA, 25 bp, Homo sapiens
tttagatgcttctcaaaattttcag

SEQ ID NO: 27158 - DNA, 25 bp, Homo sapiens
agagactaagatgctgtcccagccg

SEQ ID NO: 27159 - DNA, 25 bp, Homo sapiens
atttacttttagctctggacatcat

SEQ ID NO: 27160 - DNA, 25 bp, Homo sapiens
caaacctcttcagaccgagaatgca

SEQ ID NO: 27161 - DNA, 25 bp, Homo sapiens
cagtatgtgcagcctcagggggtgt

SEQ ID NO: 27162 - DNA, 25 bp, Homo sapiens
ccctggtcatctgtgagacgtctga

SEQ ID NO: 27163 - DNA, 25 bp, Homo sapiens
cctcacttcacaagctggtgctggg

SEQ ID NO: 27164 - DNA, 25 bp, Homo sapiens
cctccattaccttggggcagtatgt

SEQ ID NO: 27165 - DNA, 25 bp, Homo sapiens
ggtgctggggaagtatggggccctg

SEQ ID NO: 27166 - DNA, 25 bp, Homo sapiens
gtgccatctgggttctacgttggct

SEQ ID NO: 27167 - DNA, 25 bp, Homo sapiens
tacgttggctcttatgtccacggag

SEQ ID NO: 27168 - DNA, 25 bp, Homo sapiens
tctgttggctccctggacgatgagc

SEQ ID NO: 27169 - DNA, 25 bp, Homo sapiens
agaatctggggtttgccagtcagtt

SEQ ID NO: 27170 - DNA, 25 bp, Homo sapiens
ccaccctactttgtgcaggtcatac

SEQ ID NO: 27171 - DNA, 25 bp, Homo sapiens
ctactttgtgcaggtcatacctccc

SEQ ID NO: 27172 - DNA, 25 bp, Homo sapiens
gggagataatagctttcccacccta

SEQ ID NO: 27173 - DNA, 25 bp, Homo sapiens
gtaggttcacaaactcttggtcatt

SEQ ID NO: 27174 - DNA, 25 bp, Homo sapiens
gtcagttgctcaaaaggtcaatgaa

SEQ ID NO: 27175 - DNA, 25 bp, Homo sapiens
gtgtttacctaatcagtaggttcac

SEQ ID NO: 27176 - DNA, 25 bp, Homo sapiens
tcttggtcattatagtatatgccta

SEQ ID NO: 27177 - DNA, 25 bp, Homo sapiens
tgaacagttgtgtccagattaaggg

SEQ ID NO: 27178 - DNA, 25 bp, Homo sapiens
tttactgttacctgaatttattata

SEQ ID NO: 27179 - DNA, 25 bp, Homo sapiens
tttcaagtattttaattgcacctta

SEQ ID NO: 27180 - DNA, 25 bp, Homo sapiens
acagcagttgtattgtgccgtggct

SEQ ID NO: 27181 - DNA, 25 bp, Homo sapiens
atctacaaccaaatgcctcttatcc

SEQ ID NO: 27182 - DNA, 25 bp, Homo sapiens
cactgaggcctctgcaagcaacaga

SEQ ID NO: 27183 - DNA, 25 bp, Homo sapiens
catgaccgatggactttctgaagct

SEQ ID NO: 27184 - DNA, 25 bp, Homo sapiens
ctctaccccaccattagtgtatttt

SEQ ID NO: 27185 - DNA, 25 bp, Homo sapiens
ctgtctgtcatgttgccttgtaacg

SEQ ID NO: 27186 - DNA, 25 bp, Homo sapiens
gaatcagggctgtggtaatcatctt

SEQ ID NO: 27187 - DNA, 25 bp, Homo sapiens
gtgccgtggctagaactgcatgaca

SEQ ID NO: 27188 - DNA, 25 bp, Homo sapiens
tctagttagggtcctgctgtctgtc

SEQ ID NO: 27189 - DNA, 25 bp, Homo sapiens
tgaggactctactcggcaaagccag

SEQ ID NO: 27190 - DNA, 25 bp, Homo sapiens
ttaccttgcaatcacttctttcaca

SEQ ID NO: 27191 - DNA, 25 bp, Homo sapiens
acatgttaggagggtctgttttctt

SEQ ID NO: 27192 - DNA, 25 bp, Homo sapiens
attgccacgaacggtaatgttacat

SEQ ID NO: 27193 - DNA, 25 bp, Homo sapiens
gcaaattggttaggatgccacctca

SEQ ID NO: 27194 - DNA, 25 bp, Homo sapiens
gctggcttcgtttttccaaggagcc

SEQ ID NO: 27195 - DNA, 25 bp, Homo sapiens
ggtgagttcaattatctggtaaata

SEQ ID NO: 27196 - DNA, 25 bp, Homo sapiens
ggttgagaacaattgccacgaacgg

SEQ ID NO: 27197 - DNA, 25 bp, Homo sapiens
gttaggatgccacctcaagaactgt

SEQ ID NO: 27198 - DNA, 25 bp, Homo sapiens
gtttgtttttctgtcacctatagag

SEQ ID NO: 27199 - DNA, 25 bp, Homo sapiens
gtttttccaaggagcctttggtgag

SEQ ID NO: 27200 - DNA, 25 bp, Homo sapiens
tatccagcgcttcacctgaaagata

SEQ ID NO: 27201 - DNA, 25 bp, Homo sapiens
tggtaaatatccagcgcttcacctg

SEQ ID NO: 27202 - DNA, 25 bp, Homo sapiens
acagcccttgtcagatattatctcc

SEQ ID NO: 27203 - DNA, 25 bp, Homo sapiens
ccacagccatggccagagttcttcg

SEQ ID NO: 27204 - DNA, 25 bp, Homo sapiens
cctaacctcatctttgccatagaac

SEQ ID NO: 27205 - DNA, 25 bp, Homo sapiens
gaaaaatttctcatccacctttcta

SEQ ID NO: 27206 - DNA, 25 bp, Homo sapiens
gacagctctgccatcaggcagctgt

SEQ ID NO: 27207 - DNA, 25 bp, Homo sapiens
gagggcactgcatcagagcatgggg

SEQ ID NO: 27208 - DNA, 25 bp, Homo sapiens
gcacctcacgagacttcaagatcaa

SEQ ID NO: 27209 - DNA, 25 bp, Homo sapiens
tacatttttccacgagctggtgcag

SEQ ID NO: 27210 - DNA, 25 bp, Homo sapiens
tctccaggtgtgtcagagctccgga

SEQ ID NO: 27211 - DNA, 25 bp, Homo sapiens
tgaagctgtctggttctcatctgac

SEQ ID NO: 27212 - DNA, 25 bp, Homo sapiens
tgcagcacatgaagctcagcacctc

SEQ ID NO: 27213 - DNA, 25 bp, Homo sapiens
atgtctgttccatttgtgatcaagg

SEQ ID NO: 27214 - DNA, 25 bp, Homo sapiens
gaacctgagtgattttctactgtac

SEQ ID NO: 27215 - DNA, 25 bp, Homo sapiens
gaccatgtacggcatatgatttctc

SEQ ID NO: 27216 - DNA, 25 bp, Homo sapiens
gactatatgccaggtctgctttcag

SEQ ID NO: 27217 - DNA, 25 bp, Homo sapiens
ggagcagcacatggatgttcatctg

SEQ ID NO: 27218 - DNA, 25 bp, Homo sapiens
ggatgttcatctgtatacatgtgga

SEQ ID NO: 27219 - DNA, 25 bp, Homo sapiens
ggcatggccaggtatgtctgttcca

SEQ ID NO: 27220 - DNA, 25 bp, Homo sapiens
ggtctgctttcagatattcccaaat

SEQ ID NO: 27221 - DNA, 25 bp, Homo sapiens
gtagactacaagtggttgttaccca

SEQ ID NO: 27222 - DNA, 25 bp, Homo sapiens
gtggttgttacccattcaatgacta

SEQ ID NO: 27223 - DNA, 25 bp, Homo sapiens
ttatctgctggtgagactatatgcc

SEQ ID NO: 27224 - DNA, 25 bp, Homo sapiens
aaaggccacaggcagtccaggcctc

SEQ ID NO: 27225 - DNA, 25 bp, Homo sapiens
agagggagacagggctgctccccaa

SEQ ID NO: 27226 - DNA, 25 bp, Homo sapiens
ctgctctgaccttccagagcccaag

SEQ ID NO: 27227 - DNA, 25 bp, Homo sapiens
gagttgggcagccaggagtgccccc

SEQ ID NO: 27228 - DNA, 25 bp, Homo sapiens
gcaaccaactgccccagggggatat

SEQ ID NO: 27229 - DNA, 25 bp, Homo sapiens
gctgctcccctggaggacagaggga

SEQ ID NO: 27230 - DNA, 25 bp, Homo sapiens
ggaaaacgggcagtctgctctgctg

SEQ ID NO: 27231 - DNA, 25 bp, Homo sapiens
gggcagtgactcgacaaaggccaca

SEQ ID NO: 27232 - DNA, 25 bp, Homo sapiens
tgcagggagacatctgcacccctga

SEQ ID NO: 27233 - DNA, 25 bp, Homo sapiens
aagatggagcctgggtctcaagccc

SEQ ID NO: 27234 - DNA, 25 bp, Homo sapiens
aggctagaagtagcttttctgtctt

SEQ ID NO: 27235 - DNA, 25 bp, Homo sapiens
cagtgccgagtggaatgcctggttt

SEQ ID NO: 27236 - DNA, 25 bp, Homo sapiens
gaagttctgtctactgatgcagcac

SEQ ID NO: 27237 - DNA, 25 bp, Homo sapiens
ggaggagggactgggttcagctgtg

SEQ ID NO: 27238 - DNA, 25 bp, Homo sapiens
ggtactgtatgcttgccagctagaa

SEQ ID NO: 27239 - DNA, 25 bp, Homo sapiens
ggttcagctgtggtgctttgttgta

SEQ ID NO: 27240 - DNA, 25 bp, Homo sapiens
gtatccacattctcaacttcaagtc

SEQ ID NO: 27241 - DNA, 25 bp, Homo sapiens
gtgtgagtgaggcggtatccacatt

SEQ ID NO: 27242 - DNA, 25 bp, Homo sapiens
tcgctgtacctttgccacatggtac

SEQ ID NO: 27243 - DNA, 25 bp, Homo sapiens
tgtaaaaggcagcctggcctttgct

SEQ ID NO: 27244 - DNA, 25 bp, Homo sapiens
aacaatgcatcgtaaaaccttcaga

SEQ ID NO: 27245 - DNA, 25 bp, Homo sapiens
atcaccattgatatctccttgtgga

SEQ ID NO: 27246 - DNA, 25 bp, Homo sapiens
atgaatattatccctaatacctgcc

SEQ ID NO: 27247 - DNA, 25 bp, Homo sapiens
atgagacagacagttgcggtgggtg

SEQ ID NO: 27248 - DNA, 25 bp, Homo sapiens
gaactgtttgtttcaattggccatt

SEQ ID NO: 27249 - DNA, 25 bp, Homo sapiens
gagcgtgaacgtggtatcaccattg

SEQ ID NO: 27250 - DNA, 25 bp, Homo sapiens
gcggtgggtgtcatcaaagcagtgg

SEQ ID NO: 27251 - DNA, 25 bp, Homo sapiens
ggaagaacggtctcagaactgtttg

SEQ ID NO: 27252 - DNA, 25 bp, Homo sapiens
gtcgcttgctgttcgtgatatgaga

SEQ ID NO: 27253 - DNA, 25 bp, Homo sapiens
tgagaccagcaagcccatgtgtgtt

SEQ ID NO: 27254 - DNA, 25 bp, Homo sapiens
ttgagagcttctcagactatccacc

SEQ ID NO: 27255 - DNA, 25 bp, Homo sapiens
aacaatcctgatttccacttagagt

SEQ ID NO: 27256 - DNA, 25 bp, Homo sapiens
aacataattcaactgcttttaccta

SEQ ID NO: 27257 - DNA, 25 bp, Homo sapiens
aatcaaggcctcagaatttcataca

SEQ ID NO: 27258 - DNA, 25 bp, Homo sapiens
atcctaagtattggtattgcgtctc

SEQ ID NO: 27259 - DNA, 25 bp, Homo sapiens
attgcgtctcaaatttttcccatta

SEQ ID NO: 27260 - DNA, 25 bp, Homo sapiens
gcttaaacttacgtgccttacaggt

SEQ ID NO: 27261 - DNA, 25 bp, Homo sapiens
gcttttacctaaatacgcttactgc

SEQ ID NO: 27262 - DNA, 25 bp, Homo sapiens
gtacatcctataactaacttgagaa

SEQ ID NO: 27263 - DNA, 25 bp, Homo sapiens
gtagacacagctcctatattgtttt

SEQ ID NO: 27264 - DNA, 25 bp, Homo sapiens
gttatagtttactcagcttcactgt

SEQ ID NO: 27265 - DNA, 25 bp, Homo sapiens
tcagcttcactgttacatcctagat

SEQ ID NO: 27266 - DNA, 25 bp, Homo sapiens
aaagagtcactaagcacctgtatcc

SEQ ID NO: 27267 - DNA, 25 bp, Homo sapiens
aattctgatgccccaaataaccact

SEQ ID NO: 27268 - DNA, 25 bp, Homo sapiens
agtaacttgttcttgattctgctca

SEQ ID NO: 27269 - DNA, 25 bp, Homo sapiens
atatccagggtcagccagtgttgaa

SEQ ID NO: 27270 - DNA, 25 bp, Homo sapiens
gagacattttgtctacctggcactg

SEQ ID NO: 27271 - DNA, 25 bp, Homo sapiens
gagtctatcatcttgttaccagtat

SEQ ID NO: 27272 - DNA, 25 bp, Homo sapiens
gctcatgatgggggctatcttcacc

SEQ ID NO: 27273 - DNA, 25 bp, Homo sapiens
ggaagtagagcatctctgtctcttt

SEQ ID NO: 27274 - DNA, 25 bp, Homo sapiens
gtctctttatgccatgcagctgtca

SEQ ID NO: 27275 - DNA, 25 bp, Homo sapiens
tgctgaatgtcggccagctcttagc

SEQ ID NO: 27276 - DNA, 25 bp, Homo sapiens
tttagctttactactcttttgtgag

SEQ ID NO: 27277 - DNA, 25 bp, Homo sapiens
acaaaatgggcccttgcctctaaat

SEQ ID NO: 27278 - DNA, 25 bp, Homo sapiens
atcacagttgtgttcctgacactca

SEQ ID NO: 27279 - DNA, 25 bp, Homo sapiens
caagaccgtttgtccacttcatttt

SEQ ID NO: 27280 - DNA, 25 bp, Homo sapiens
caggtttttagtttgttcttcagat

SEQ ID NO: 27281 - DNA, 25 bp, Homo sapiens
gtccacttcattttgtataatcaca

SEQ ID NO: 27282 - DNA, 25 bp, Homo sapiens
tgcatcccacgttctgttaatttag

SEQ ID NO: 27283 - DNA, 25 bp, Homo sapiens
tgttaacctttctaaccttcacgat

SEQ ID NO: 27284 - DNA, 25 bp, Homo sapiens
tttttcataattactctacttccca

SEQ ID NO: 27285 - DNA, 25 bp, Homo sapiens
cagtactgttgcgccgcagtttgga

SEQ ID NO: 27286 - DNA, 25 bp, Homo sapiens
ccactcctcctactgtattttattg

SEQ ID NO: 27287 - DNA, 25 bp, Homo sapiens
cgttgctggcagtactgttgcgccg

SEQ ID NO: 27288 - DNA, 25 bp, Homo sapiens
ctgtagttaagtgtggatgcatgtg

SEQ ID NO: 27289 - DNA, 25 bp, Homo sapiens
gagaattccgaattggggaacacac

SEQ ID NO: 27290 - DNA, 25 bp, Homo sapiens
gccgcagtttggagtcactgtagtt

SEQ ID NO: 27291 - DNA, 25 bp, Homo sapiens
ggaacacacgatacctgtttttctt

SEQ ID NO: 27292 - DNA, 25 bp, Homo sapiens
tcctcctactgtattttattggaca

SEQ ID NO: 27293 - DNA, 25 bp, Homo sapiens
ttgcgccgcagtttggagtcactgt

SEQ ID NO: 27294 - DNA, 25 bp, Homo sapiens
tttccgttgctggcagtactgttgc

SEQ ID NO: 27295 - DNA, 25 bp, Homo sapiens
tttcttttccgttgctggcagtact

SEQ ID NO: 27296 - DNA, 25 bp, Homo sapiens
agtagatcagtccctttactttttg

SEQ ID NO: 27297 - DNA, 25 bp, Homo sapiens
ctcagcgagcatcaccatggctagt

SEQ ID NO: 27298 - DNA, 25 bp, Homo sapiens
cttcagttttcctttcctagctgat

SEQ ID NO: 27299 - DNA, 25 bp, Homo sapiens
gaaaaatttatgccactcctttatt

SEQ ID NO: 27300 - DNA, 25 bp, Homo sapiens
gaactaacatctccacttgattcct

SEQ ID NO: 27301 - DNA, 25 bp, Homo sapiens
gcattagccggatataaactttctt

SEQ ID NO: 27302 - DNA, 25 bp, Homo sapiens
ggcgagtggacaattctggaactgg

SEQ ID NO: 27303 - DNA, 25 bp, Homo sapiens
gtatctaatcaatcagacactactt

SEQ ID NO: 27304 - DNA, 25 bp, Homo sapiens
gtttttgagcatgttttctctaatt

SEQ ID NO: 27305 - DNA, 25 bp, Homo sapiens
tcctagctgatgatttgttcactta

SEQ ID NO: 27306 - DNA, 25 bp, Homo sapiens
ttttgctctgcatagggtaacatag

SEQ ID NO: 27307 - DNA, 25 bp, Homo sapiens
agcaataacagccaagcctgtgccc

SEQ ID NO: 27308 - DNA, 25 bp, Homo sapiens
catcaggcatcagtagcccgtgtgg

SEQ ID NO: 27309 - DNA, 25 bp, Homo sapiens
ccgggccgggattgaggccagtcta

SEQ ID NO: 27310 - DNA, 25 bp, Homo sapiens
cctcttcggtggcaactttgcacat

SEQ ID NO: 27311 - DNA, 25 bp, Homo sapiens
gaggccagtctagatgtgcagtacc

SEQ ID NO: 27312 - DNA, 25 bp, Homo sapiens
gcgatacaacttgacctcacaagac

SEQ ID NO: 27313 - DNA, 25 bp, Homo sapiens
ggagcagtatttccatgactcagac

SEQ ID NO: 27314 - DNA, 25 bp, Homo sapiens
gggctctggcaccagcaataacagc

SEQ ID NO: 27315 - DNA, 25 bp, Homo sapiens
gtacctgatgagtgctggtgccaac

SEQ ID NO: 27316 - DNA, 25 bp, Homo sapiens
gtggcaactttgcacatcaggcatc

SEQ ID NO: 27317 - DNA, 25 bp, Homo sapiens
tgacctcacaagacgtgggctctgg

SEQ ID NO: 27318 - DNA, 25 bp, Homo sapiens
actgcaggattgggctgcaccatgg

SEQ ID NO: 27319 - DNA, 25 bp, Homo sapiens
atctgagatcagacagacccaggct

SEQ ID NO: 27320 - DNA, 25 bp, Homo sapiens
cttacggtcaggcacgactgcaaat

SEQ ID NO: 27321 - DNA, 25 bp, Homo sapiens
gaggctctctagtgaaggcttacgg

SEQ ID NO: 27322 - DNA, 25 bp, Homo sapiens
gatgcctttgtggttttcacatctc

SEQ ID NO: 27323 - DNA, 25 bp, Homo sapiens
gcaggcaactgtgtgtctcaaaagc

SEQ ID NO: 27324 - DNA, 25 bp, Homo sapiens
ggggtgtccttgttcatattgaggc

SEQ ID NO: 27325 - DNA, 25 bp, Homo sapiens
tcaccctgcgccaaagtgctaggat

SEQ ID NO: 27326 - DNA, 25 bp, Homo sapiens
tgtgttgtctgtctttgttgttgag

SEQ ID NO: 27327 - DNA, 25 bp, Homo sapiens
ttaacaggcaggagccatcacacct

SEQ ID NO: 27328 - DNA, 25 bp, Homo sapiens
ttgcctcatccgtaatggggtgtcc

SEQ ID NO: 27329 - DNA, 25 bp, Homo sapiens
aaccatgaccaatgcagcagccact

SEQ ID NO: 27330 - DNA, 25 bp, Homo sapiens
agccgggtactaccattctacagta

SEQ ID NO: 27331 - DNA, 25 bp, Homo sapiens
cactattgcccctggagttgttatg

SEQ ID NO: 27332 - DNA, 25 bp, Homo sapiens
cttaaggacctttactgccacaaat

SEQ ID NO: 27333 - DNA, 25 bp, Homo sapiens
ggacagcagatcttagtgcccagca

SEQ ID NO: 27334 - DNA, 25 bp, Homo sapiens
gggaagcagctcgagagtgtcgtag

SEQ ID NO: 27335 - DNA, 25 bp, Homo sapiens
gggcctgcaaacattaaccatgacc

SEQ ID NO: 27336 - DNA, 25 bp, Homo sapiens
gtaccgatggggtacagggcctgca

SEQ ID NO: 27337 - DNA, 25 bp, Homo sapiens
gtatattgccattacccagggagga

SEQ ID NO: 27338 - DNA, 25 bp, Homo sapiens
tattgccattacccagggaggagca

SEQ ID NO: 27339 - DNA, 25 bp, Homo sapiens
tgcctctggagacgtacaaacatac

SEQ ID NO: 27340 - DNA, 25 bp, Homo sapiens
aaaactcctgtgcttttgagcaagg

SEQ ID NO: 27341 - DNA, 25 bp, Homo sapiens
aaccaactacaacttccctatagct

SEQ ID NO: 27342 - DNA, 25 bp, Homo sapiens
accagtcactaggatatttctaccc

SEQ ID NO: 27343 - DNA, 25 bp, Homo sapiens
acgtgttgcaagtcaaccagtcact

SEQ ID NO: 27344 - DNA, 25 bp, Homo sapiens
caacttccctatagcttctaagcag

SEQ ID NO: 27345 - DNA, 25 bp, Homo sapiens
ggacttttgccctctagaaagcaac

SEQ ID NO: 27346 - DNA, 25 bp, Homo sapiens
taagccacagcaatggttttgtaga

SEQ ID NO: 27347 - DNA, 25 bp, Homo sapiens
tcagcattacttgggaaaacgtgtt

SEQ ID NO: 27348 - DNA, 25 bp, Homo sapiens
tctagaaagcaactgaggccaggtg

SEQ ID NO: 27349 - DNA, 25 bp, Homo sapiens
ttctaagcagtttcatcagcattac

SEQ ID NO: 27350 - DNA, 25 bp, Homo sapiens
ttgagcaaggacttttgccctctag

SEQ ID NO: 27351 - DNA, 25 bp, Homo sapiens
actatgacatggtgcactttcctcc

SEQ ID NO: 27352 - DNA, 25 bp, Homo sapiens
agattggagaggttgatgtcgagca

SEQ ID NO: 27353 - DNA, 25 bp, Homo sapiens
caacattacctgtcatatactgaag

SEQ ID NO: 27354 - DNA, 25 bp, Homo sapiens
cttccagttatgcagcacctggcta

SEQ ID NO: 27355 - DNA, 25 bp, Homo sapiens
gaatctcttcttccagttatgcagc

SEQ ID NO: 27356 - DNA, 25 bp, Homo sapiens
gcacctggctaagaatgtagtcatg

SEQ ID NO: 27357 - DNA, 25 bp, Homo sapiens
ggaactaactatgttggactatgac

SEQ ID NO: 27358 - DNA, 25 bp, Homo sapiens
tcctccttctcaaattgcagcagga

SEQ ID NO: 27359 - DNA, 25 bp, Homo sapiens
tggacaccaactctacaacattacc

SEQ ID NO: 27360 - DNA, 25 bp, Homo sapiens
tggcaccatgtgccatctgtacata

SEQ ID NO: 27361 - DNA, 25 bp, Homo sapiens
tttgcacttccttcggagagcatct

SEQ ID NO: 27362 - DNA, 25 bp, Homo sapiens
acgttttgagtgaactggtgttggt

SEQ ID NO: 27363 - DNA, 25 bp, Homo sapiens
agcctagataacctgggtatcccag

SEQ ID NO: 27364 - DNA, 25 bp, Homo sapiens
atcctggtctgtacctctttaggtc

SEQ ID NO: 27365 - DNA, 25 bp, Homo sapiens
cctgacttcaaggatcctggtctgt

SEQ ID NO: 27366 - DNA, 25 bp, Homo sapiens
gaccaaattaaaagactggctgggc

SEQ ID NO: 27367 - DNA, 25 bp, Homo sapiens
gagttgagctgattggaggaccaaa

SEQ ID NO: 27368 - DNA, 25 bp, Homo sapiens
ggaatggcttcatataggagttcac

SEQ ID NO: 27369 - DNA, 25 bp, Homo sapiens
gtcttatacgtgactcctgacttca

SEQ ID NO: 27370 - DNA, 25 bp, Homo sapiens
taatgcttaatggttgtgtagtctt

SEQ ID NO: 27371 - DNA, 25 bp, Homo sapiens
tacctctttaggtcaacacgttttg

SEQ ID NO: 27372 - DNA, 25 bp, Homo sapiens
tcccttgccttcactgtaatgctta

SEQ ID NO: 27373 - DNA, 25 bp, Homo sapiens
atctgtacatttgtcatacttgcca

SEQ ID NO: 27374 - DNA, 25 bp, Homo sapiens
caagcctccttcagttttatatttc

SEQ ID NO: 27375 - DNA, 25 bp, Homo sapiens
cgaacctggccctatttcaaataat

SEQ ID NO: 27376 - DNA, 25 bp, Homo sapiens
gaccagctgtcaaccatctgtacat

SEQ ID NO: 27377 - DNA, 25 bp, Homo sapiens
gactttctttgtattcatggaggtg

SEQ ID NO: 27378 - DNA, 25 bp, Homo sapiens
gatgctgcctcagaacatttgggat

SEQ ID NO: 27379 - DNA, 25 bp, Homo sapiens
ggaagagcagcgaagaggcacaaaa

SEQ ID NO: 27380 - DNA, 25 bp, Homo sapiens
gtcatacttgccaaattgaggcgga

SEQ ID NO: 27381 - DNA, 25 bp, Homo sapiens
tgaacataatggaaccaagcctcct

SEQ ID NO: 27382 - DNA, 25 bp, Homo sapiens
tgaagacctggttttgatgctgcct

SEQ ID NO: 27383 - DNA, 25 bp, Homo sapiens
ttatatttctcgacagtggcttaat

SEQ ID NO: 27384 - DNA, 25 bp, Homo sapiens
agagcagtttgttgagtttcgggat

SEQ ID NO: 27385 - DNA, 25 bp, Homo sapiens
gagtatattggtgacatgtacagcc

SEQ ID NO: 27386 - DNA, 25 bp, Homo sapiens
gatggttagagatgagcggaggttt

SEQ ID NO: 27387 - DNA, 25 bp, Homo sapiens
gccatgatgggaatactgatgagcc

SEQ ID NO: 27388 - DNA, 25 bp, Homo sapiens
ggagatcgttgacaagtatgactta

SEQ ID NO: 27389 - DNA, 25 bp, Homo sapiens
ggatggcaagcttaccaaggaggag

SEQ ID NO: 27390 - DNA, 25 bp, Homo sapiens
ggcagaagccaggcacctggtctat

SEQ ID NO: 27391 - DNA, 25 bp, Homo sapiens
acacattctcctacaacttttataa

SEQ ID NO: 27392 - DNA, 25 bp, Homo sapiens
agatcttagtcgggactagccggcc

SEQ ID NO: 27393 - DNA, 25 bp, Homo sapiens
agtggagcgaatgtatcgagacaca

SEQ ID NO: 27394 - DNA, 25 bp, Homo sapiens
ctttctcgtcggaataccgtctggc

SEQ ID NO: 27395 - DNA, 25 bp, Homo sapiens
gaaagtgaaaccctggtgctccaga

SEQ ID NO: 27396 - DNA, 25 bp, Homo sapiens
gaagcctcacttcagaaacacagtg

SEQ ID NO: 27397 - DNA, 25 bp, Homo sapiens
ggacgcaaagatctttcgaggccag

SEQ ID NO: 27398 - DNA, 25 bp, Homo sapiens
gggactagccggccaaggatgaagc

SEQ ID NO: 27399 - DNA, 25 bp, Homo sapiens
ggtgctccagacaaagatcttagtc

SEQ ID NO: 27400 - DNA, 25 bp, Homo sapiens
taccgtctggctgtgctacgaagtg

SEQ ID NO: 27401 - DNA, 25 bp, Homo sapiens
tataatagacccatcctttctcgtc

SEQ ID NO: 27402 - DNA, 25 bp, Homo sapiens
aaatttaagctgctcgccgagaaag

SEQ ID NO: 27403 - DNA, 25 bp, Homo sapiens
acagcgatcactaaaccgttccgcc

SEQ ID NO: 27404 - DNA, 25 bp, Homo sapiens
cccaagtgccgtgacctgaaagttg

SEQ ID NO: 27405 - DNA, 25 bp, Homo sapiens
cttcaaccggcagacgctgacagag

SEQ ID NO: 27406 - DNA, 25 bp, Homo sapiens
gaaagagcagattcaggcgtggatg

SEQ ID NO: 27407 - DNA, 25 bp, Homo sapiens
gaacgcacgcgcagaaatcgactac

SEQ ID NO: 27408 - DNA, 25 bp, Homo sapiens
gctcctgatgagttcagagaccctc

SEQ ID NO: 27409 - DNA, 25 bp, Homo sapiens
gctgacgaccagagatcctacagta

SEQ ID NO: 27410 - DNA, 25 bp, Homo sapiens
ggttcgcgaaagccattgctgacga

SEQ ID NO: 27411 - DNA, 25 bp, Homo sapiens
tcgactacagcgacgctcctgatga

SEQ ID NO: 27412 - DNA, 25 bp, Homo sapiens
tctgatggacaccctcatgacagac

SEQ ID NO: 27413 - DNA, 25 bp, Homo sapiens
aactctggtgacatttgctttacct

SEQ ID NO: 27414 - DNA, 25 bp, Homo sapiens
acacgcctaaaccaactctggtgac

SEQ ID NO: 27415 - DNA, 25 bp, Homo sapiens
atactagcaaagatactgacccctt

SEQ ID NO: 27416 - DNA, 25 bp, Homo sapiens
ctataatccagatacttctttttca

SEQ ID NO: 27417 - DNA, 25 bp, Homo sapiens
gacatcagttctgcttggcacaagt

SEQ ID NO: 27418 - DNA, 25 bp, Homo sapiens
gcttggcacaagtatcgtggatcaa

SEQ ID NO: 27419 - DNA, 25 bp, Homo sapiens
ggctacatatccatcattgtttatt

SEQ ID NO: 27420 - DNA, 25 bp, Homo sapiens
gtatcgtggatcaaaaacagagtat

SEQ ID NO: 27421 - DNA, 25 bp, Homo sapiens
tagcaaagatactgacccctttagg

SEQ ID NO: 27422 - DNA, 25 bp, Homo sapiens
tttcctgctttggctacatatccat

SEQ ID NO: 27423 - DNA, 25 bp, Homo sapiens
tttttcatggattcccgagatcacc

SEQ ID NO: 27424 - DNA, 25 bp, Homo sapiens
aaactctcttcttccattaaaatgt

SEQ ID NO: 27425 - DNA, 25 bp, Homo sapiens
agcagcaaaatccttacttccagca

SEQ ID NO: 27426 - DNA, 25 bp, Homo sapiens
atggcattgttcaagtacccactgg

SEQ ID NO: 27427 - DNA, 25 bp, Homo sapiens
caaactgctgtctcttaaatctctt

SEQ ID NO: 27428 - DNA, 25 bp, Homo sapiens
cccctttggccctgtatcaggagca

SEQ ID NO: 27429 - DNA, 25 bp, Homo sapiens
cctatcctgctactacaccaacagg

SEQ ID NO: 27430 - DNA, 25 bp, Homo sapiens
cgcggtgcatcaagcttgctatggc

SEQ ID NO: 27431 - DNA, 25 bp, Homo sapiens
gagaacccgctggtttattgcgacg

SEQ ID NO: 27432 - DNA, 25 bp, Homo sapiens
gagagagcagccagagtggcacccc

SEQ ID NO: 27433 - DNA, 25 bp, Homo sapiens
gtacccactggaccgtggttttgca

SEQ ID NO: 27434 - DNA, 25 bp, Homo sapiens
gtgttcctgtaatgacgcaaccaac

SEQ ID NO: 27435 - DNA, 25 bp, Homo sapiens
agatgtgcttttccagactgatcca

SEQ ID NO: 27436 - DNA, 25 bp, Homo sapiens
cagcagcaaagctataatccccctc

SEQ ID NO: 27437 - DNA, 25 bp, Homo sapiens
ccagcagcacctcgggaagttacgg

SEQ ID NO: 27438 - DNA, 25 bp, Homo sapiens
ccccctcagggctatggacagcaga

SEQ ID NO: 27439 - DNA, 25 bp, Homo sapiens
ggcagcggtggctatggacagcagg

SEQ ID NO: 27440 - DNA, 25 bp, Homo sapiens
ggccaagatcaatcctccatgagta

SEQ ID NO: 27441 - DNA, 25 bp, Homo sapiens
ggtggcagtggtggcggttatggca

SEQ ID NO: 27442 - DNA, 25 bp, Homo sapiens
gttacaaccgcagcagtggtggcta

SEQ ID NO: 27443 - DNA, 25 bp, Homo sapiens
tacagccagcagcctagctatggtg

SEQ ID NO: 27444 - DNA, 25 bp, Homo sapiens
tcatacatcaccactcctgaaagca

SEQ ID NO: 27445 - DNA, 25 bp, Homo sapiens
tgggcagccccagagtgggagctac

SEQ ID NO: 27446 - DNA, 25 bp, Homo sapiens
acgcaactccaaattgctttcctat

SEQ ID NO: 27447 - DNA, 25 bp, Homo sapiens
gaaagccccggtactactaattgag

SEQ ID NO: 27448 - DNA, 25 bp, Homo sapiens
gaaatcactcaagcttcaccttggt

SEQ ID NO: 27449 - DNA, 25 bp, Homo sapiens
gatgatctgcttaagagtcttcata

SEQ ID NO: 27450 - DNA, 25 bp, Homo sapiens
gcagtatgccgagatcgctgcactt

SEQ ID NO: 27451 - DNA, 25 bp, Homo sapiens
gcatagctgagaaagccccggtact

SEQ ID NO: 27452 - DNA, 25 bp, Homo sapiens
gcttcaccttggtaaactgaactca

SEQ ID NO: 27453 - DNA, 25 bp, Homo sapiens
taagaaactgatttcggccgggtgc

SEQ ID NO: 27454 - DNA, 25 bp, Homo sapiens
tattctgaactcgaaaggcctttta

SEQ ID NO: 27455 - DNA, 25 bp, Homo sapiens
ttattgctcgctttacgcaactcca

SEQ ID NO: 27456 - DNA, 25 bp, Homo sapiens
tttccctcccttaaaatggcatagc

SEQ ID NO: 27457 - DNA, 25 bp, Homo sapiens
aaggctggaacctatttgcctcagt

SEQ ID NO: 27458 - DNA, 25 bp, Homo sapiens
actatcttttcatctcattaattca

SEQ ID NO: 27459 - DNA, 25 bp, Homo sapiens
attgtttcgcaattcggcattttga

SEQ ID NO: 27460 - DNA, 25 bp, Homo sapiens
gaaaacattgatcacctgggtttct

SEQ ID NO: 27461 - DNA, 25 bp, Homo sapiens
gatcctgccaacattgttcatgact

SEQ ID NO: 27462 - DNA, 25 bp, Homo sapiens
gcaaacagggctttactatcttttc

SEQ ID NO: 27463 - DNA, 25 bp, Homo sapiens
ggaaacttacaaactgcaacgcaga

SEQ ID NO: 27464 - DNA, 25 bp, Homo sapiens
gggtttctttatttatcgactgtgt

SEQ ID NO: 27465 - DNA, 25 bp, Homo sapiens
taagtgctatgtgatccctctgaac

SEQ ID NO: 27466 - DNA, 25 bp, Homo sapiens
tgaacacttccattgttatgccacc

SEQ ID NO: 27467 - DNA, 25 bp, Homo sapiens
ttgcctcagtcctatctgattcatg

SEQ ID NO: 27468 - DNA, 25 bp, Homo sapiens
agagagggaggccagtgtcagggtc

SEQ ID NO: 27469 - DNA, 25 bp, Homo sapiens
aggcaagccagtcgggtttcctgga

SEQ ID NO: 27470 - DNA, 25 bp, Homo sapiens
cctccgccactgcagtgattgttag

SEQ ID NO: 27471 - DNA, 25 bp, Homo sapiens
ctgccaagcatccagaccacaaatg

SEQ ID NO: 27472 - DNA, 25 bp, Homo sapiens
ctggtagggcatgtgcctgtttccc

SEQ ID NO: 27473 - DNA, 25 bp, Homo sapiens
cttcctgagcttctctcagatttcc

SEQ ID NO: 27474 - DNA, 25 bp, Homo sapiens
gactaagtcaagctacttcctgagc

SEQ ID NO: 27475 - DNA, 25 bp, Homo sapiens
tcactttaccttctgccaaatgcag

SEQ ID NO: 27476 - DNA, 25 bp, Homo sapiens
tcttgccccaattcttaggatttct

SEQ ID NO: 27477 - DNA, 25 bp, Homo sapiens
tgcctctcagctagttggcgggggt

SEQ ID NO: 27478 - DNA, 25 bp, Homo sapiens
tggcctcgctaggcccaggagagga

SEQ ID NO: 27479 - DNA, 25 bp, Homo sapiens
acacagtgcattgccctttgttggg

SEQ ID NO: 27480 - DNA, 25 bp, Homo sapiens
acacatgcttgtcggaacgctttct

SEQ ID NO: 27481 - DNA, 25 bp, Homo sapiens
acttggtgttagccacgctgtttac

SEQ ID NO: 27482 - DNA, 25 bp, Homo sapiens
cctctcaatcactactcttcttgaa

SEQ ID NO: 27483 - DNA, 25 bp, Homo sapiens
gagctgtctttgtcgtggagatctg

SEQ ID NO: 27484 - DNA, 25 bp, Homo sapiens
ggagatctggaactttgcacatgtc

SEQ ID NO: 27485 - DNA, 25 bp, Homo sapiens
gggagtctgtttgttccaatgggtt

SEQ ID NO: 27486 - DNA, 25 bp, Homo sapiens
gtgtccgaagttgagatggcctgcc

SEQ ID NO: 27487 - DNA, 25 bp, Homo sapiens
gtgttcagttctgttacacagtgca

SEQ ID NO: 27488 - DNA, 25 bp, Homo sapiens
gttctcaaaagcttaccagtgtgga

SEQ ID NO: 27489 - DNA, 25 bp, Homo sapiens
ttgcacatgtcactactggggaggt

SEQ ID NO: 27490 - DNA, 25 bp, Homo sapiens
aactgcagtcttctgctagccaata

SEQ ID NO: 27491 - DNA, 25 bp, Homo sapiens
actcattctaacattgcttacttaa

SEQ ID NO: 27492 - DNA, 25 bp, Homo sapiens
cacctcttcactctctatagaatat

SEQ ID NO: 27493 - DNA, 25 bp, Homo sapiens
catctgtcactcactatattcacaa

SEQ ID NO: 27494 - DNA, 25 bp, Homo sapiens
ccttcacctcagtggagcttctgag

SEQ ID NO: 27495 - DNA, 25 bp, Homo sapiens
gctacatagccctatcgaaatgcga

SEQ ID NO: 27496 - DNA, 25 bp, Homo sapiens
ggctttgcttagtatcatgtccatg

SEQ ID NO: 27497 - DNA, 25 bp, Homo sapiens
gggatagaaaggccacctcttcact

SEQ ID NO: 27498 - DNA, 25 bp, Homo sapiens
gttttatactgctcaagatcgtcat

SEQ ID NO: 27499 - DNA, 25 bp, Homo sapiens
tcctcatgtaattgccatctgtcac

SEQ ID NO: 27500 - DNA, 25 bp, Homo sapiens
tgtaccttcgttcaaatatcctcat

SEQ ID NO: 27501 - DNA, 25 bp, Homo sapiens
acgctgatggcttggcagagcacct

SEQ ID NO: 27502 - DNA, 25 bp, Homo sapiens
cacagcagctcctttgtaagtacca

SEQ ID NO: 27503 - DNA, 25 bp, Homo sapiens
gagaagaccgtgagttgatgccagt

SEQ ID NO: 27504 - DNA, 25 bp, Homo sapiens
gattactcaagcagacagcacacga

SEQ ID NO: 27505 - DNA, 25 bp, Homo sapiens
gctgccactacatcgttatctggag

SEQ ID NO: 27506 - DNA, 25 bp, Homo sapiens
ggcagagcaccttcggttaacttgc

SEQ ID NO: 27507 - DNA, 25 bp, Homo sapiens
tcggttaacttgcatctccagattg

SEQ ID NO: 27508 - DNA, 25 bp, Homo sapiens
tgatgccagttatcatgctgccact

SEQ ID NO: 27509 - DNA, 25 bp, Homo sapiens
tgtaagtaccaggtcatgtccatcc

SEQ ID NO: 27510 - DNA, 25 bp, Homo sapiens
ttatctggaggcaacttctggtggt

SEQ ID NO: 27511 - DNA, 25 bp, Homo sapiens
tttttctcctaatatgctgtttcca

SEQ ID NO: 27512 - DNA, 25 bp, Homo sapiens
acattttgatatttgagccattcct

SEQ ID NO: 27513 - DNA, 25 bp, Homo sapiens
acttttcctgcactggacagtaaaa

SEQ ID NO: 27514 - DNA, 25 bp, Homo sapiens
agaatctaggaaccttgcctgcgac

SEQ ID NO: 27515 - DNA, 25 bp, Homo sapiens
agcttctcattagagccgtgatggt

SEQ ID NO: 27516 - DNA, 25 bp, Homo sapiens
atgtgtgctgtctaaaatccaatgt

SEQ ID NO: 27517 - DNA, 25 bp, Homo sapiens
caagcatgcatctttcatgtgtgta

SEQ ID NO: 27518 - DNA, 25 bp, Homo sapiens
cacgtgagctgatcgtggctgcacc

SEQ ID NO: 27519 - DNA, 25 bp, Homo sapiens
gaaagagaactagcttgcacatttt

SEQ ID NO: 27520 - DNA, 25 bp, Homo sapiens
gatcaagccctataattagcttctc

SEQ ID NO: 27521 - DNA, 25 bp, Homo sapiens
ggaggggcatgccacctaatgatca

SEQ ID NO: 27522 - DNA, 25 bp, Homo sapiens
tgcctgcgaccaatcatggagccac

SEQ ID NO: 27523 - DNA, 25 bp, Homo sapiens
agaagacagtgactctttttccctg

SEQ ID NO: 27524 - DNA, 25 bp, Homo sapiens
atgacgtgaatgaggctgtgcagct

SEQ ID NO: 27525 - DNA, 25 bp, Homo sapiens
ctgatcactgggctcaggtcagggc

SEQ ID NO: 27526 - DNA, 25 bp, Homo sapiens
gcatgcagcctgtcggcagagtgtc

SEQ ID NO: 27527 - DNA, 25 bp, Homo sapiens
gtattgtagtttattgcccggagat

SEQ ID NO: 27528 - DNA, 25 bp, Homo sapiens
gtggaatactgtggatgtctgtgca

SEQ ID NO: 27529 - DNA, 25 bp, Homo sapiens
gtgtcttaacaccagatgctacttt

SEQ ID NO: 27530 - DNA, 25 bp, Homo sapiens
tcagtgtccttctcatttcagtagg

SEQ ID NO: 27531 - DNA, 25 bp, Homo sapiens
tgagggcagtgcggtggaggtgagg

SEQ ID NO: 27532 - DNA, 25 bp, Homo sapiens
ttcttgctgccccatgagtgtggca

SEQ ID NO: 27533 - DNA, 25 bp, Homo sapiens
tttcgtggcagtctaacctcaggcc

SEQ ID NO: 27534 - DNA, 25 bp, Homo sapiens
aatatgttttggtttctaagctata

SEQ ID NO: 27535 - DNA, 25 bp, Homo sapiens
aatttgaaattctacccatcttgag

SEQ ID NO: 27536 - DNA, 25 bp, Homo sapiens
atggatggtattcaccggggaaaca

SEQ ID NO: 27537 - DNA, 25 bp, Homo sapiens
cagagtttggttcccactttcattg

SEQ ID NO: 27538 - DNA, 25 bp, Homo sapiens
cccatcttgagggaggaccgttcct

SEQ ID NO: 27539 - DNA, 25 bp, Homo sapiens
gaactttgggtagccatgtgtaaga

SEQ ID NO: 27540 - DNA, 25 bp, Homo sapiens
gaagccttggtagcagtcctgtaaa

SEQ ID NO: 27541 - DNA, 25 bp, Homo sapiens
gatttctcagagtttggttcccact

SEQ ID NO: 27542 - DNA, 25 bp, Homo sapiens
ggaccgttcctcagttaaggacttg

SEQ ID NO: 27543 - DNA, 25 bp, Homo sapiens
tggttttgtaattgccactgggaaa

SEQ ID NO: 27544 - DNA, 25 bp, Homo sapiens
tttcaaaaacgcccactgtgatgtg

SEQ ID NO: 27545 - DNA, 25 bp, Homo sapiens
agtctatttatcagttggtttcaac

SEQ ID NO: 27546 - DNA, 25 bp, Homo sapiens
atattcagtaccttgggcaatccag

SEQ ID NO: 27547 - DNA, 25 bp, Homo sapiens
attgccaactagatacactgcctca

SEQ ID NO: 27548 - DNA, 25 bp, Homo sapiens
cctctgtgctacccttaacttaggg

SEQ ID NO: 27549 - DNA, 25 bp, Homo sapiens
ctggtctgcatgctggaagaggttg

SEQ ID NO: 27550 - DNA, 25 bp, Homo sapiens
gacctgttgctgcatagaactctcc

SEQ ID NO: 27551 - DNA, 25 bp, Homo sapiens
gagcaaaccatattgtgcctcttca

SEQ ID NO: 27552 - DNA, 25 bp, Homo sapiens
gagttctctcagttgggtagtaact

SEQ ID NO: 27553 - DNA, 25 bp, Homo sapiens
gattccatgctaaatgtcagttacc

SEQ ID NO: 27554 - DNA, 25 bp, Homo sapiens
tagatacactgcctcaatcttgacc

SEQ ID NO: 27555 - DNA, 25 bp, Homo sapiens
ttcatcttgacccaggctcttatag

SEQ ID NO: 27556 - DNA, 25 bp, Homo sapiens
aaagctcaacagactgcagccctta

SEQ ID NO: 27557 - DNA, 25 bp, Homo sapiens
aaccacctatgtaatctcatgttgt

SEQ ID NO: 27558 - DNA, 25 bp, Homo sapiens
agaagagcagtcatggccctgaggt

SEQ ID NO: 27559 - DNA, 25 bp, Homo sapiens
caaaaagcgccttggtaccaaccag

SEQ ID NO: 27560 - DNA, 25 bp, Homo sapiens
cactagcttttttctcacttttgta

SEQ ID NO: 27561 - DNA, 25 bp, Homo sapiens
catactgtgttgaaactccaaggcc

SEQ ID NO: 27562 - DNA, 25 bp, Homo sapiens
gatgcaatactcagacactagcttt

SEQ ID NO: 27563 - DNA, 25 bp, Homo sapiens
ggccaggtttctgccaaaaagcgcc

SEQ ID NO: 27564 - DNA, 25 bp, Homo sapiens
ggtctcttttatgctttaccatata

SEQ ID NO: 27565 - DNA, 25 bp, Homo sapiens
ggtgctagtgaaactggaccttcgg

SEQ ID NO: 27566 - DNA, 25 bp, Homo sapiens
ttcccctttactcaaatctgggcct

SEQ ID NO: 27567 - DNA, 25 bp, Homo sapiens
aacagatctagtttcttgcattttt

SEQ ID NO: 27568 - DNA, 25 bp, Homo sapiens
aactatcgcttacggggcattggca

SEQ ID NO: 27569 - DNA, 25 bp, Homo sapiens
agcagtttgtgctatacttttcccc

SEQ ID NO: 27570 - DNA, 25 bp, Homo sapiens
atatgctcacgaatcaatgctgatt

SEQ ID NO: 27571 - DNA, 25 bp, Homo sapiens
attatgccatatttcccttcattat

SEQ ID NO: 27572 - DNA, 25 bp, Homo sapiens
gaagcaagtcaacttacctattaaa

SEQ ID NO: 27573 - DNA, 25 bp, Homo sapiens
gagatgaacatcttttgtcaaacca

SEQ ID NO: 27574 - DNA, 25 bp, Homo sapiens
gcaaactgtcttgactactctggag

SEQ ID NO: 27575 - DNA, 25 bp, Homo sapiens
tacacacgaatgtcctcagtatcca

SEQ ID NO: 27576 - DNA, 25 bp, Homo sapiens
tactctggagatgctgtagccaaac

SEQ ID NO: 27577 - DNA, 25 bp, Homo sapiens
ttcctctattagatgtttcaacact

SEQ ID NO: 27578 - DNA, 25 bp, Homo sapiens
aaaaacatcagtacttcctaccact

SEQ ID NO: 27579 - DNA, 25 bp, Homo sapiens
aacagttatatccctattcctcaac

SEQ ID NO: 27580 - DNA, 25 bp, Homo sapiens
agttctacttttcatcagtgctatt

SEQ ID NO: 27581 - DNA, 25 bp, Homo sapiens
attcctcaactgaatgtctttcaat

SEQ ID NO: 27582 - DNA, 25 bp, Homo sapiens
catgtgccatataagcttacctaac

SEQ ID NO: 27583 - DNA, 25 bp, Homo sapiens
cgcctggccaagaatggacattttt

SEQ ID NO: 27584 - DNA, 25 bp, Homo sapiens
cttcctaccactgctgcatgagtat

SEQ ID NO: 27585 - DNA, 25 bp, Homo sapiens
ggatggggtttctctaattgctaat

SEQ ID NO: 27586 - DNA, 25 bp, Homo sapiens
ggtggcagcaaatgtaaatcttggc

SEQ ID NO: 27587 - DNA, 25 bp, Homo sapiens
tagtggaacttaatcatgtgccata

SEQ ID NO: 27588 - DNA, 25 bp, Homo sapiens
ttggctgaatggtcttaattactca

SEQ ID NO: 27589 - DNA, 25 bp, Homo sapiens
agtgctgggttcaaagggctgtgtg

SEQ ID NO: 27590 - DNA, 25 bp, Homo sapiens
cacaggcgagagtgggcgtgtcacc

SEQ ID NO: 27591 - DNA, 25 bp, Homo sapiens
ccttgcaaggaacgtctcttccggc

SEQ ID NO: 27592 - DNA, 25 bp, Homo sapiens
ctgctcattcctacccaggtagtgg

SEQ ID NO: 27593 - DNA, 25 bp, Homo sapiens
gatgcagaggtggaaggccctgggc

SEQ ID NO: 27594 - DNA, 25 bp, Homo sapiens
gctgtggatcaaggaaggctgcccc

SEQ ID NO: 27595 - DNA, 25 bp, Homo sapiens
gtctacctcccacaaggagcaaggg

SEQ ID NO: 27596 - DNA, 25 bp, Homo sapiens
gtgtgtgggtgcacacatctgtccc

SEQ ID NO: 27597 - DNA, 25 bp, Homo sapiens
gttcccagcaagtctgcagctgtgc

SEQ ID NO: 27598 - DNA, 25 bp, Homo sapiens
tatgcagtgagacctgtctacctcc

SEQ ID NO: 27599 - DNA, 25 bp, Homo sapiens
ttccagaggggtctcactgacagcc

SEQ ID NO: 27600 - DNA, 25 bp, Homo sapiens
aaatctctctgggtcttcgagtgga

SEQ ID NO: 27601 - DNA, 25 bp, Homo sapiens
acagcttggcttcagcctatcagcg

SEQ ID NO: 27602 - DNA, 25 bp, Homo sapiens
agctggcaccccgggatgtgatgta

SEQ ID NO: 27603 - DNA, 25 bp, Homo sapiens
ataccacgtccccaagaatcagagg

SEQ ID NO: 27604 - DNA, 25 bp, Homo sapiens
ccagctcccgacggaaggggtctgt

SEQ ID NO: 27605 - DNA, 25 bp, Homo sapiens
gaagccccgggtggcagtggattga

SEQ ID NO: 27606 - DNA, 25 bp, Homo sapiens
gacgtgccggggttgagctggcacc

SEQ ID NO: 27607 - DNA, 25 bp, Homo sapiens
gcactgtagagactagccagctccc

SEQ ID NO: 27608 - DNA, 25 bp, Homo sapiens
ggaacgggcttgattgctgccctta

SEQ ID NO: 27609 - DNA, 25 bp, Homo sapiens
gtctgtgtcttgtattgatcccatc

SEQ ID NO: 27610 - DNA, 25 bp, Homo sapiens
tgatgtaagaacgccctgcgcgtca

SEQ ID NO: 27611 - DNA, 25 bp, Homo sapiens
aaacccagaagccagtttaggctag

SEQ ID NO: 27612 - DNA, 25 bp, Homo sapiens
aacagtcaaacttctatgcacaaaa

SEQ ID NO: 27613 - DNA, 25 bp, Homo sapiens
aagtggcaccaaaagagcctgtgga

SEQ ID NO: 27614 - DNA, 25 bp, Homo sapiens
aggactccaaaaattcctcctcagc

SEQ ID NO: 27615 - DNA, 25 bp, Homo sapiens
attgccatgatgttgtactagtaca

SEQ ID NO: 27616 - DNA, 25 bp, Homo sapiens
caaattttagccatctgtttgtgat

SEQ ID NO: 27617 - DNA, 25 bp, Homo sapiens
cagcccagagcccagcaatgaagct

SEQ ID NO: 27618 - DNA, 25 bp, Homo sapiens
gagaacatgaattctcaacctgaga

SEQ ID NO: 27619 - DNA, 25 bp, Homo sapiens
gtgatttctgtcataagcattttgt

SEQ ID NO: 27620 - DNA, 25 bp, Homo sapiens
tcgcctccagtcataacagtcaaac

SEQ ID NO: 27621 - DNA, 25 bp, Homo sapiens
ttcctcctcagctgttcatttaaat

SEQ ID NO: 27622 - DNA, 25 bp, Homo sapiens
acagccactagtgggtttgccagtg

SEQ ID NO: 27623 - DNA, 25 bp, Homo sapiens
accagtggttcatccaactgctacc

SEQ ID NO: 27624 - DNA, 25 bp, Homo sapiens
atggagcatctactttatcaaaact

SEQ ID NO: 27625 - DNA, 25 bp, Homo sapiens
cagtagttctacgccagtacagcac

SEQ ID NO: 27626 - DNA, 25 bp, Homo sapiens
ccagtagtttgctcccacagaatat

SEQ ID NO: 27627 - DNA, 25 bp, Homo sapiens
gacaaacccgtatcacattcttgca

SEQ ID NO: 27628 - DNA, 25 bp, Homo sapiens
gacaagcattccagtgatgccagta

SEQ ID NO: 27629 - DNA, 25 bp, Homo sapiens
gcaccccatcaaaccagtggttcat

SEQ ID NO: 27630 - DNA, 25 bp, Homo sapiens
gcagagactcacagtagttctacgc

SEQ ID NO: 27631 - DNA, 25 bp, Homo sapiens
ttacgctacagtctgatcaccagcc

SEQ ID NO: 27632 - DNA, 25 bp, Homo sapiens
ttccttctagtccatttacgctaca

SEQ ID NO: 27633 - DNA, 25 bp, Homo sapiens
aatcatattggtattctagttggca

SEQ ID NO: 27634 - DNA, 25 bp, Homo sapiens
aatgagatccattcagcgactaact

SEQ ID NO: 27635 - DNA, 25 bp, Homo sapiens
agcgactaactggcaaggcactcaa

SEQ ID NO: 27636 - DNA, 25 bp, Homo sapiens
attaaggccattttatttctaagtg

SEQ ID NO: 27637 - DNA, 25 bp, Homo sapiens
attctagttggcaatgtcttacatt

SEQ ID NO: 27638 - DNA, 25 bp, Homo sapiens
atttaccttgttattctcaggcatt

SEQ ID NO: 27639 - DNA, 25 bp, Homo sapiens
gatttgattacagtggctttgacta

SEQ ID NO: 27640 - DNA, 25 bp, Homo sapiens
ggcaaggcactcaaaacatgtcatt

SEQ ID NO: 27641 - DNA, 25 bp, Homo sapiens
gtgaacagacttgaaactccagagc

SEQ ID NO: 27642 - DNA, 25 bp, Homo sapiens
gtgggagccaatttttgcctcagtc

SEQ ID NO: 27643 - DNA, 25 bp, Homo sapiens
tgatgctattattttaactctatta

SEQ ID NO: 27644 - DNA, 25 bp, Homo sapiens
accaaatagctgtgggctttctgga

SEQ ID NO: 27645 - DNA, 25 bp, Homo sapiens
agacagaatgccctgttcgtgcagt

SEQ ID NO: 27646 - DNA, 25 bp, Homo sapiens
cagaatgccctgttcgtgcagtttg

SEQ ID NO: 27647 - DNA, 25 bp, Homo sapiens
cagatcccctgaactaccaaatagc

SEQ ID NO: 27648 - DNA, 25 bp, Homo sapiens
catacacagcacaaagaatgtcaga

SEQ ID NO: 27649 - DNA, 25 bp, Homo sapiens
ccctgttcgtgcagtttgctgaggt

SEQ ID NO: 27650 - DNA, 25 bp, Homo sapiens
cgtgcagtttgctgaggtgttcccg

SEQ ID NO: 27651 - DNA, 25 bp, Homo sapiens
gaactaccaaatagctgtgggcttt

SEQ ID NO: 27652 - DNA, 25 bp, Homo sapiens
gaatgtcagacagaatgccctgttc

SEQ ID NO: 27653 - DNA, 25 bp, Homo sapiens
gatcccctgaactaccaaatagctg

SEQ ID NO: 27654 - DNA, 25 bp, Homo sapiens
gtcagacagaatgccctgttcgtgc

SEQ ID NO: 27655 - DNA, 25 bp, Homo sapiens
aaaatctaatgccctctgggatgag

SEQ ID NO: 27656 - DNA, 25 bp, Homo sapiens
aaaggaagccaaacctgctgtatgg

SEQ ID NO: 27657 - DNA, 25 bp, Homo sapiens
aacagaagcctatcagttgctgaag

SEQ ID NO: 27658 - DNA, 25 bp, Homo sapiens
aaggccacccttcaggataatacaa

SEQ ID NO: 27659 - DNA, 25 bp, Homo sapiens
aatcatcttgcagcttgccatctat

SEQ ID NO: 27660 - DNA, 25 bp, Homo sapiens
acagatgcttctgtgtcacacttgt

SEQ ID NO: 27661 - DNA, 25 bp, Homo sapiens
agcttgccatctattctgaatgaca

SEQ ID NO: 27662 - DNA, 25 bp, Homo sapiens
agttgctgaagaaggccacccttca

SEQ ID NO: 27663 - DNA, 25 bp, Homo sapiens
gtatggctcaacagtgttcctacaa

SEQ ID NO: 27664 - DNA, 25 bp, Homo sapiens
gtggctgcagatatcccaatcacag

SEQ ID NO: 27665 - DNA, 25 bp, Homo sapiens
gtgtcacacttgtcaggtttgaata

SEQ ID NO: 27666 - DNA, 25 bp, Homo sapiens
aattttcctcagctgtgttgcacat

SEQ ID NO: 27667 - DNA, 25 bp, Homo sapiens
actgccctggattctcacaaggagc

SEQ ID NO: 27668 - DNA, 25 bp, Homo sapiens
actttgttctgacgatggttccttg

SEQ ID NO: 27669 - DNA, 25 bp, Homo sapiens
agcggcgaacagggatttagcaaca

SEQ ID NO: 27670 - DNA, 25 bp, Homo sapiens
ctccttgcacattatcatcctaatg

SEQ ID NO: 27671 - DNA, 25 bp, Homo sapiens
gagcccaagagtcagagaagcgctg

SEQ ID NO: 27672 - DNA, 25 bp, Homo sapiens
ggacttatgtggtacaggaggctgc

SEQ ID NO: 27673 - DNA, 25 bp, Homo sapiens
ggagctgaacacttcctcgaaaaga

SEQ ID NO: 27674 - DNA, 25 bp, Homo sapiens
tccggccatcgagtcggttgactaa

SEQ ID NO: 27675 - DNA, 25 bp, Homo sapiens
ttcactgacagggccgaccattaca

SEQ ID NO: 27676 - DNA, 25 bp, Homo sapiens
ttttctaccatatctgtattttctt

SEQ ID NO: 27677 - DNA, 25 bp, Homo sapiens
attgacctttggaagttcattctgt

SEQ ID NO: 27678 - DNA, 25 bp, Homo sapiens
catttatcccatgcatgttatgcct

SEQ ID NO: 27679 - DNA, 25 bp, Homo sapiens
gagtttctgtagtaatctggttgga

SEQ ID NO: 27680 - DNA, 25 bp, Homo sapiens
gatacccctgaattaagaggtgctg

SEQ ID NO: 27681 - DNA, 25 bp, Homo sapiens
gcctaaactaagacggatacccctg

SEQ ID NO: 27682 - DNA, 25 bp, Homo sapiens
ggtgctgttatacattgaccaggct

SEQ ID NO: 27683 - DNA, 25 bp, Homo sapiens
ggttgactgctctggtgtttttata

SEQ ID NO: 27684 - DNA, 25 bp, Homo sapiens
gtgtgtcgacatttaattgaccttt

SEQ ID NO: 27685 - DNA, 25 bp, Homo sapiens
gttgtgcttgtatttttgtgtcttt

SEQ ID NO: 27686 - DNA, 25 bp, Homo sapiens
ttgataaaccttagtcccaagcatt

SEQ ID NO: 27687 - DNA, 25 bp, Homo sapiens
tttatattcattcgtgctttagcat

SEQ ID NO: 27688 - DNA, 25 bp, Homo sapiens
aaattactcttctttaatgctaagt

SEQ ID NO: 27689 - DNA, 25 bp, Homo sapiens
aatgctaagtattgacacatcgttg

SEQ ID NO: 27690 - DNA, 25 bp, Homo sapiens
acttggtccatcttgtctcaggaga

SEQ ID NO: 27691 - DNA, 25 bp, Homo sapiens
gaaacctttctccaatgtagcagaa

SEQ ID NO: 27692 - DNA, 25 bp, Homo sapiens
gaatccttatagaatttgtctttta

SEQ ID NO: 27693 - DNA, 25 bp, Homo sapiens
gagagctaacgtttgatagttctaa

SEQ ID NO: 27694 - DNA, 25 bp, Homo sapiens
gcggattgagagacttggtccatct

SEQ ID NO: 27695 - DNA, 25 bp, Homo sapiens
tatcctcttccctgtattatagcaa

SEQ ID NO: 27696 - DNA, 25 bp, Homo sapiens
ttaaagatttttgaggccgggcaca

SEQ ID NO: 27697 - DNA, 25 bp, Homo sapiens
ttgacacatcgttgtttgtttttca

SEQ ID NO: 27698 - DNA, 25 bp, Homo sapiens
tttcattgtttttgcggattgagag

SEQ ID NO: 27699 - DNA, 25 bp, Homo sapiens
aaggcaagataatcccaaacttgac

SEQ ID NO: 27700 - DNA, 25 bp, Homo sapiens
atcacagatatcgaagagatgccag

SEQ ID NO: 27701 - DNA, 25 bp, Homo sapiens
caaacttgacagtatgcgttccatt

SEQ ID NO: 27702 - DNA, 25 bp, Homo sapiens
gaaccagtagtgaaagcatttctca

SEQ ID NO: 27703 - DNA, 25 bp, Homo sapiens
gaagctgtagtgtctccatctgaca

SEQ ID NO: 27704 - DNA, 25 bp, Homo sapiens
gacagtatgcgttccattttgagga

SEQ ID NO: 27705 - DNA, 25 bp, Homo sapiens
gagatgccagaacactagaagatga

SEQ ID NO: 27706 - DNA, 25 bp, Homo sapiens
ggatcccgctacaatctgatgaact

SEQ ID NO: 27707 - DNA, 25 bp, Homo sapiens
gtagtgtctccatctgacaaaacta

SEQ ID NO: 27708 - DNA, 25 bp, Homo sapiens
tttacaaccgctacataatgaaaag

SEQ ID NO: 27709 - DNA, 25 bp, Homo sapiens
tttctcaacaatggatcccgctaca

SEQ ID NO: 27710 - DNA, 25 bp, Homo sapiens
accactgaggactgttgctgtattg

SEQ ID NO: 27711 - DNA, 25 bp, Homo sapiens
agacagagtaatttgcagtttgttt

SEQ ID NO: 27712 - DNA, 25 bp, Homo sapiens
aggcattttttccagagtggtgcag

SEQ ID NO: 27713 - DNA, 25 bp, Homo sapiens
ccagagtggtgcagtaccactgagg

SEQ ID NO: 27714 - DNA, 25 bp, Homo sapiens
gactttcaaatctttggctgccttg

SEQ ID NO: 27715 - DNA, 25 bp, Homo sapiens
gaggcgacacgaaggatttgctgct

SEQ ID NO: 27716 - DNA, 25 bp, Homo sapiens
gccagtaggaggcgacacgaaggat

SEQ ID NO: 27717 - DNA, 25 bp, Homo sapiens
gcgacacgaaggatttgctgctgcc

SEQ ID NO: 27718 - DNA, 25 bp, Homo sapiens
ggactgttgctgtattgattaggaa

SEQ ID NO: 27719 - DNA, 25 bp, Homo sapiens
gggatgggaaggaacctgaaggcat

SEQ ID NO: 27720 - DNA, 25 bp, Homo sapiens
tatacttttgtttatctacaaccca

SEQ ID NO: 27721 - DNA, 25 bp, Homo sapiens
atatagctgtgaaactcatctaaat

SEQ ID NO: 27722 - DNA, 25 bp, Homo sapiens
attttgtacctgaagccttgtttgg

SEQ ID NO: 27723 - DNA, 25 bp, Homo sapiens
caaacagaaggacccatggcagtat

SEQ ID NO: 27724 - DNA, 25 bp, Homo sapiens
ccttctcagcaggtacctatatgat

SEQ ID NO: 27725 - DNA, 25 bp, Homo sapiens
ctgagtttactaggatatctgagct

SEQ ID NO: 27726 - DNA, 25 bp, Homo sapiens
cttgtttggaattctaggctttcta

SEQ ID NO: 27727 - DNA, 25 bp, Homo sapiens
gtatcttgattctatgttgtctgga

SEQ ID NO: 27728 - DNA, 25 bp, Homo sapiens
tattgcttatctacatctctattat

SEQ ID NO: 27729 - DNA, 25 bp, Homo sapiens
tcatctttttattgcttatctacat

SEQ ID NO: 27730 - DNA, 25 bp, Homo sapiens
tcgagaagtgataacccaaaggcta

SEQ ID NO: 27731 - DNA, 25 bp, Homo sapiens
tgtcagtttatccatcttatccttc

SEQ ID NO: 27732 - DNA, 25 bp, Homo sapiens
cagggaagattctcttggacccgtg

SEQ ID NO: 27733 - DNA, 25 bp, Homo sapiens
cccgtcacacttgaggacaccaagg

SEQ ID NO: 27734 - DNA, 25 bp, Homo sapiens
ctgcccccaatttcacacatggatg

SEQ ID NO: 27735 - DNA, 25 bp, Homo sapiens
gacccgtgtctgctggttgggaagt

SEQ ID NO: 27736 - DNA, 25 bp, Homo sapiens
gcagtggggggacttcatggttaga

SEQ ID NO: 27737 - DNA, 25 bp, Homo sapiens
gctggttcagatgttcatgagcacc

SEQ ID NO: 27738 - DNA, 25 bp, Homo sapiens
ggacaccaaggctgtggtctgtgca

SEQ ID NO: 27739 - DNA, 25 bp, Homo sapiens
gggaagtggagaaagccgccctgtt

SEQ ID NO: 27740 - DNA, 25 bp, Homo sapiens
ggtctgtgcagtgaatcggggcagt

SEQ ID NO: 27741 - DNA, 25 bp, Homo sapiens
gtttggtggctaaaatgcccgcctt

SEQ ID NO: 27742 - DNA, 25 bp, Homo sapiens
tgcctccattttgaaacgtcttttc

SEQ ID NO: 27743 - DNA, 25 bp, Homo sapiens
agaacactttgcacagttcggccat

SEQ ID NO: 27744 - DNA, 25 bp, Homo sapiens
agaagaattccttggactgcggcgt

SEQ ID NO: 27745 - DNA, 25 bp, Homo sapiens
aggacttcggaatgcactacaacag

SEQ ID NO: 27746 - DNA, 25 bp, Homo sapiens
caatcagccggttgcttttgtgaga

SEQ ID NO: 27747 - DNA, 25 bp, Homo sapiens
cctcagcagcgcgaggtgctgcggc

SEQ ID NO: 27748 - DNA, 25 bp, Homo sapiens
ctgcggcgtcgagtcagctgaaaga

SEQ ID NO: 27749 - DNA, 25 bp, Homo sapiens
gcgtagaagtatcaatcagccggtt

SEQ ID NO: 27750 - DNA, 25 bp, Homo sapiens
ggctttcacagaggtttgggttggg

SEQ ID NO: 27751 - DNA, 25 bp, Homo sapiens
gtgctgcggcgctgcgtagaagtat

SEQ ID NO: 27752 - DNA, 25 bp, Homo sapiens
gttcggccatgtcagaaggtgcatt

SEQ ID NO: 27753 - DNA, 25 bp, Homo sapiens
tttgacaaggagactggctttcaca

SEQ ID NO: 27754 - DNA, 25 bp, Homo sapiens
atccatcgagactatctggtatgcg

SEQ ID NO: 27755 - DNA, 25 bp, Homo sapiens
cacagttcttagcaaatgcagttac

SEQ ID NO: 27756 - DNA, 25 bp, Homo sapiens
gactatctggtatgcgttatgtatg

SEQ ID NO: 27757 - DNA, 25 bp, Homo sapiens
gatagccagcagtggatgttactcc

SEQ ID NO: 27758 - DNA, 25 bp, Homo sapiens
gcagttacaatccatagatagccag

SEQ ID NO: 27759 - DNA, 25 bp, Homo sapiens
gctgaaagatgtctgtgtgcccgta

SEQ ID NO: 27760 - DNA, 25 bp, Homo sapiens
ggaattctccattaactgtggattt

SEQ ID NO: 27761 - DNA, 25 bp, Homo sapiens
ggtgaagcagatttatccatcgaga

SEQ ID NO: 27762 - DNA, 25 bp, Homo sapiens
gtgacttcatgtaaagtttctttgt

SEQ ID NO: 27763 - DNA, 25 bp, Homo sapiens
gtgcccgtatcaacatgtgacttca

SEQ ID NO: 27764 - DNA, 25 bp, Homo sapiens
tatgtatgtagtctgttgctgctga

SEQ ID NO: 27765 - DNA, 25 bp, Homo sapiens
aaaggagcagggcagtcctttccct

SEQ ID NO: 27766 - DNA, 25 bp, Homo sapiens
acatggctacagcaactgcactgga

SEQ ID NO: 27767 - DNA, 25 bp, Homo sapiens
acgggttatatgccaactctgtttg

SEQ ID NO: 27768 - DNA, 25 bp, Homo sapiens
atgtctaagcgttcagtttttcaaa

SEQ ID NO: 27769 - DNA, 25 bp, Homo sapiens
caggtttccttcctcaaaaggagca

SEQ ID NO: 27770 - DNA, 25 bp, Homo sapiens
ctgcactggaacatttttgcttggt

SEQ ID NO: 27771 - DNA, 25 bp, Homo sapiens
gcagcttattgcgatgtgtatggcc

SEQ ID NO: 27772 - DNA, 25 bp, Homo sapiens
ggttgacattcacaaactgttcttt

SEQ ID NO: 27773 - DNA, 25 bp, Homo sapiens
gtgtatggccatgtttcattctcaa

SEQ ID NO: 27774 - DNA, 25 bp, Homo sapiens
tgagaacttgccttgcaggtttcct

SEQ ID NO: 27775 - DNA, 25 bp, Homo sapiens
ttgtgaacatattttggacccttaa

SEQ ID NO: 27776 - DNA, 25 bp, Homo sapiens
agcagcacagacatctgctccatca

SEQ ID NO: 27777 - DNA, 25 bp, Homo sapiens
agcagcgagcatccagggtttgcag

SEQ ID NO: 27778 - DNA, 25 bp, Homo sapiens
agggacgatgttacagactctgttt

SEQ ID NO: 27779 - DNA, 25 bp, Homo sapiens
cactgttctgtttccacgggatgga

SEQ ID NO: 27780 - DNA, 25 bp, Homo sapiens
gaaagttctgcagcatggcttttta

SEQ ID NO: 27781 - DNA, 25 bp, Homo sapiens
gacagaggcttggaccgaggcctgg

SEQ ID NO: 27782 - DNA, 25 bp, Homo sapiens
gaggcttgcagatcgggggcatagg

SEQ ID NO: 27783 - DNA, 25 bp, Homo sapiens
ggtgaatgttcactttctgttctcc

SEQ ID NO: 27784 - DNA, 25 bp, Homo sapiens
tctccagtgtcactgttctgtttcc

SEQ ID NO: 27785 - DNA, 25 bp, Homo sapiens
tgtgaattcctaccaactattgaca

SEQ ID NO: 27786 - DNA, 25 bp, Homo sapiens
tgtgatctattttttccagccatgt

SEQ ID NO: 27787 - DNA, 25 bp, Homo sapiens
aaacttgtctttgtactccttatat

SEQ ID NO: 27788 - DNA, 25 bp, Homo sapiens
atatgactttttccgttttgagcct

SEQ ID NO: 27789 - DNA, 25 bp, Homo sapiens
atctcctggagatttccgggactgt

SEQ ID NO: 27790 - DNA, 25 bp, Homo sapiens
gatacttgtttgctggaggcttcac

SEQ ID NO: 27791 - DNA, 25 bp, Homo sapiens
gggactgtttagaggatttctttga

SEQ ID NO: 27792 - DNA, 25 bp, Homo sapiens
ggtctttgggacctagaaatgcagt

SEQ ID NO: 27793 - DNA, 25 bp, Homo sapiens
gtagccagtaaactttactcctggg

SEQ ID NO: 27794 - DNA, 25 bp, Homo sapiens
gttgctgaattgcctggtagccagt

SEQ ID NO: 27795 - DNA, 25 bp, Homo sapiens
gtttctgaagagctctgttgctgaa

SEQ ID NO: 27796 - DNA, 25 bp, Homo sapiens
gttttgagcctgctttttcattctt

SEQ ID NO: 27797 - DNA, 25 bp, Homo sapiens
tatttcccacaatccttcgttaaat

SEQ ID NO: 27798 - DNA, 25 bp, Homo sapiens
aaacgattttcttctgtagaatgtt

SEQ ID NO: 27799 - DNA, 25 bp, Homo sapiens
acttcgtattgacccttatctgtaa

SEQ ID NO: 27800 - DNA, 25 bp, Homo sapiens
agctacagtcattttttctttgcac

SEQ ID NO: 27801 - DNA, 25 bp, Homo sapiens
atctgtaaaacacctatttgggata

SEQ ID NO: 27802 - DNA, 25 bp, Homo sapiens
caatatatcatcctttggcatccca

SEQ ID NO: 27803 - DNA, 25 bp, Homo sapiens
gaatgtttgacttcgtattgaccct

SEQ ID NO: 27804 - DNA, 25 bp, Homo sapiens
ggatgctgaaatttttcccatggaa

SEQ ID NO: 27805 - DNA, 25 bp, Homo sapiens
gtacaactcgtatttatctctgatg

SEQ ID NO: 27806 - DNA, 25 bp, Homo sapiens
tctagatagatgtgagctttttctt

SEQ ID NO: 27807 - DNA, 25 bp, Homo sapiens
ttcccatggaacatagccacatcta

SEQ ID NO: 27808 - DNA, 25 bp, Homo sapiens
ttttctttgcactttggatgctgaa

SEQ ID NO: 27809 - DNA, 25 bp, Homo sapiens
agacagagacgtcattgcttcaccc

SEQ ID NO: 27810 - DNA, 25 bp, Homo sapiens
ccataccgactgtccaactagcaac

SEQ ID NO: 27811 - DNA, 25 bp, Homo sapiens
cccggggctacacaatgggggagct

SEQ ID NO: 27812 - DNA, 25 bp, Homo sapiens
cttctgatgtcccggggctacacaa

SEQ ID NO: 27813 - DNA, 25 bp, Homo sapiens
gaaaacaacttctgatgtcccgggg

SEQ ID NO: 27814 - DNA, 25 bp, Homo sapiens
gacagctccaagaatcatgagtagg

SEQ ID NO: 27815 - DNA, 25 bp, Homo sapiens
gacgcggccgcgaatttagtagtag

SEQ ID NO: 27816 - DNA, 25 bp, Homo sapiens
gactcctaggataggtctctctcat

SEQ ID NO: 27817 - DNA, 25 bp, Homo sapiens
gcaacagacttcacctggttttgga

SEQ ID NO: 27818 - DNA, 25 bp, Homo sapiens
ggggagctgagcacttaggaaggag

SEQ ID NO: 27819 - DNA, 25 bp, Homo sapiens
tggaaatacaaacagcccttctcct

SEQ ID NO: 27820 - DNA, 25 bp, Homo sapiens
aaggctttactcatcagtcttaagt

SEQ ID NO: 27821 - DNA, 25 bp, Homo sapiens
actcatcagtcttaagtatggttgt

SEQ ID NO: 27822 - DNA, 25 bp, Homo sapiens
agaagtaactgttactcaagccacc

SEQ ID NO: 27823 - DNA, 25 bp, Homo sapiens
aggctttactcatcagtcttaagta

SEQ ID NO: 27824 - DNA, 25 bp, Homo sapiens
ctcatcagtcttaagtatggttgtt

SEQ ID NO: 27825 - DNA, 25 bp, Homo sapiens
gaaactaaggctttactcatcagtc

SEQ ID NO: 27826 - DNA, 25 bp, Homo sapiens
gaagtaactgttactcaagccacca

SEQ ID NO: 27827 - DNA, 25 bp, Homo sapiens
ggaaactaaggctttactcatcagt

SEQ ID NO: 27828 - DNA, 25 bp, Homo sapiens
ggctttactcatcagtcttaagtat

SEQ ID NO: 27829 - DNA, 25 bp, Homo sapiens
taaggctttactcatcagtcttaag

SEQ ID NO: 27830 - DNA, 25 bp, Homo sapiens
tactcatcagtcttaagtatggttg

SEQ ID NO: 27831 - DNA, 25 bp, Homo sapiens
ttactcatcagtcttaagtatggtt

SEQ ID NO: 27832 - DNA, 25 bp, Homo sapiens
tttactcatcagtcttaagtatggt

SEQ ID NO: 27833 - DNA, 25 bp, Homo sapiens
aaattgttccgtgaagccgcgctct

SEQ ID NO: 27834 - DNA, 25 bp, Homo sapiens
accccatgcatactcttgggaagca

SEQ ID NO: 27835 - DNA, 25 bp, Homo sapiens
agcggccctctttcctgtctgtgta

SEQ ID NO: 27836 - DNA, 25 bp, Homo sapiens
caccccatgcatactcttgggaagc

SEQ ID NO: 27837 - DNA, 25 bp, Homo sapiens
cagcttcctgggagattagaaattc

SEQ ID NO: 27838 - DNA, 25 bp, Homo sapiens
ctacttccctgactggagctaaatc

SEQ ID NO: 27839 - DNA, 25 bp, Homo sapiens
ctggccatcttgaggggttttctaa

SEQ ID NO: 27840 - DNA, 25 bp, Homo sapiens
ctgtgtaaattgttccgtgaagccg

SEQ ID NO: 27841 - DNA, 25 bp, Homo sapiens
gagtaggcgtcctctaaccacgggg

SEQ ID NO: 27842 - DNA, 25 bp, Homo sapiens
gatccagaagaccttgagagtaggc

SEQ ID NO: 27843 - DNA, 25 bp, Homo sapiens
gcggccctctttcctgtctgtgtaa

SEQ ID NO: 27844 - DNA, 25 bp, Homo sapiens
ggaccccagctcttgaagggctgag

SEQ ID NO: 27845 - DNA, 25 bp, Homo sapiens
gtctttactatgtcctaggtttcgt

SEQ ID NO: 27846 - DNA, 25 bp, Homo sapiens
tcctaggtttcgtagatgcccctct

SEQ ID NO: 27847 - DNA, 25 bp, Homo sapiens
tcctgtctgtgtaaattgttccgtg

SEQ ID NO: 27848 - DNA, 25 bp, Homo sapiens
ttgagtcccgtttaacagcagatcc

SEQ ID NO: 27849 - DNA, 25 bp, Homo sapiens
aggcgagctcctcgacctctgaggg

SEQ ID NO: 27850 - DNA, 25 bp, Homo sapiens
cactgttcctgtggaggatgtctac

SEQ ID NO: 27851 - DNA, 25 bp, Homo sapiens
cagctttcctcactgttcctgtgga

SEQ ID NO: 27852 - DNA, 25 bp, Homo sapiens
caggcgagctcctcgacctctgagg

SEQ ID NO: 27853 - DNA, 25 bp, Homo sapiens
ccagctttcctcactgttcctgtgg

SEQ ID NO: 27854 - DNA, 25 bp, Homo sapiens
ctttcctcactgttcctgtggagga

SEQ ID NO: 27855 - DNA, 25 bp, Homo sapiens
gcaccgggctagctggctgcccaga

SEQ ID NO: 27856 - DNA, 25 bp, Homo sapiens
gcgagctcctcgacctctgagggac

SEQ ID NO: 27857 - DNA, 25 bp, Homo sapiens
gctttcctcactgttcctgtggagg

SEQ ID NO: 27858 - DNA, 25 bp, Homo sapiens
ggcgagctcctcgacctctgaggga

SEQ ID NO: 27859 - DNA, 25 bp, Homo sapiens
gtgggctctatattttcattccaaa

SEQ ID NO: 27860 - DNA, 25 bp, Homo sapiens
gttcctgtggaggatgtctacgccc

SEQ ID NO: 27861 - DNA, 25 bp, Homo sapiens
tcctgtggaggatgtctacgcccag

SEQ ID NO: 27862 - DNA, 25 bp, Homo sapiens
ttcctcactgttcctgtggaggatg

SEQ ID NO: 27863 - DNA, 25 bp, Homo sapiens
ttcctgtggaggatgtctacgccca

SEQ ID NO: 27864 - DNA, 25 bp, Homo sapiens
tttcctcactgttcctgtggaggat

SEQ ID NO: 27865 - DNA, 25 bp, Homo sapiens
cccgccgtcatagacttaaaggact

SEQ ID NO: 27866 - DNA, 25 bp, Homo sapiens
ccgccgtcatagacttaaaggactg

SEQ ID NO: 27867 - DNA, 25 bp, Homo sapiens
cctcggtttttcctaacttgctctg

SEQ ID NO: 27868 - DNA, 25 bp, Homo sapiens
ctcggccctgccagaggaagcgctg

SEQ ID NO: 27869 - DNA, 25 bp, Homo sapiens
gagcccgcgttgctgttcccacagg

SEQ ID NO: 27870 - DNA, 25 bp, Homo sapiens
gagggagccatctcttgctcccgag

SEQ ID NO: 27871 - DNA, 25 bp, Homo sapiens
gccgtcatagacttaaaggactgca

SEQ ID NO: 27872 - DNA, 25 bp, Homo sapiens
ggtttttcctaacttgctctgcatg

SEQ ID NO: 27873 - DNA, 25 bp, Homo sapiens
tagggcccctctgctgctgtgctgg

SEQ ID NO: 27874 - DNA, 25 bp, Homo sapiens
tcccagtggaactgccttcttgggc

SEQ ID NO: 27875 - DNA, 25 bp, Homo sapiens
tcctaacttgctctgcatgctgtca

SEQ ID NO: 27876 - DNA, 25 bp, Homo sapiens
tctagggcccctctgctgctgtgct

SEQ ID NO: 27877 - DNA, 25 bp, Homo sapiens
tgctgttcccacagggcctcggttt

SEQ ID NO: 27878 - DNA, 25 bp, Homo sapiens
tggagcccgcgttgctgttcccaca

SEQ ID NO: 27879 - DNA, 25 bp, Homo sapiens
ttcctaacttgctctgcatgctgtc

SEQ ID NO: 27880 - DNA, 25 bp, Homo sapiens
ttctacacaacaagctgggctggtc

SEQ ID NO: 27881 - DNA, 25 bp, Homo sapiens
aaagcccagagttcactgtgtgtca

SEQ ID NO: 27882 - DNA, 25 bp, Homo sapiens
agaagagtacttgagctccactccg

SEQ ID NO: 27883 - DNA, 25 bp, Homo sapiens
atcctgcaccttgttgtcatgaact

SEQ ID NO: 27884 - DNA, 25 bp, Homo sapiens
atgttcactctttgaatttcctgga

SEQ ID NO: 27885 - DNA, 25 bp, Homo sapiens
ggctgaatcattctcatttacttaa

SEQ ID NO: 27886 - DNA, 25 bp, Homo sapiens
ggcttcatctcttgtgtggggagtt

SEQ ID NO: 27887 - DNA, 25 bp, Homo sapiens
gtacctgctgtatatactgctgacc

SEQ ID NO: 27888 - DNA, 25 bp, Homo sapiens
tccactccgcagcgtctgaagttgc

SEQ ID NO: 27889 - DNA, 25 bp, Homo sapiens
tctgaagttgctggacgcgtacctg

SEQ ID NO: 27890 - DNA, 25 bp, Homo sapiens
ttcatcctagcggtttgcctgagaa

SEQ ID NO: 27891 - DNA, 25 bp, Homo sapiens
tttgacacttactgctagctctgct

SEQ ID NO: 27892 - DNA, 25 bp, Homo sapiens
aaagatggaactccaccctttgctt

SEQ ID NO: 27893 - DNA, 25 bp, Homo sapiens
aaatgttgtccaggttctattgcca

SEQ ID NO: 27894 - DNA, 25 bp, Homo sapiens
aagtggaagccaaattcatcaatta

SEQ ID NO: 27895 - DNA, 25 bp, Homo sapiens
attttccgtcttatttcatttctgt

SEQ ID NO: 27896 - DNA, 25 bp, Homo sapiens
caagaggctattcaagatctctggc

SEQ ID NO: 27897 - DNA, 25 bp, Homo sapiens
gatgactgaccaagaggctattcaa

SEQ ID NO: 27898 - DNA, 25 bp, Homo sapiens
gccaagaatgtgttgtccaaaatgc

SEQ ID NO: 27899 - DNA, 25 bp, Homo sapiens
gtccaggttctattgccaagaatgt

SEQ ID NO: 27900 - DNA, 25 bp, Homo sapiens
tgcagagtgagaactttccctaccg

SEQ ID NO: 27901 - DNA, 25 bp, Homo sapiens
tgttgtccaggttctattgccaaga

SEQ ID NO: 27902 - DNA, 25 bp, Homo sapiens
ttttccgtcttatttcatttctgta

SEQ ID NO: 27903 - DNA, 25 bp, Homo sapiens
aacagccactgttggaggggccatg

SEQ ID NO: 27904 - DNA, 25 bp, Homo sapiens
agttggagctggatcctatggccat

SEQ ID NO: 27905 - DNA, 25 bp, Homo sapiens
ccgcagttcccaaggacttgtcatt

SEQ ID NO: 27906 - DNA, 25 bp, Homo sapiens
cggaagtgagacacctcagctcttc

SEQ ID NO: 27907 - DNA, 25 bp, Homo sapiens
ctggatgcctgggcttcacacaaga

SEQ ID NO: 27908 - DNA, 25 bp, Homo sapiens
gacatgtccacggttatgagccgga

SEQ ID NO: 27909 - DNA, 25 bp, Homo sapiens
gcgctggcgcctgaagagttggagc

SEQ ID NO: 27910 - DNA, 25 bp, Homo sapiens
ggctcctgagctgcaaggtgtggaa

SEQ ID NO: 27911 - DNA, 25 bp, Homo sapiens
tgagccggaagggcccggctcctga

SEQ ID NO: 27912 - DNA, 25 bp, Homo sapiens
tggagacccctgaactcattgagct

SEQ ID NO: 27913 - DNA, 25 bp, Homo sapiens
ttttttggccctacgtctggatgcc

SEQ ID NO: 27914 - DNA, 25 bp, Homo sapiens
aaaggacaacactatctggagccac

SEQ ID NO: 27915 - DNA, 25 bp, Homo sapiens
aaagggctgcaggcatgggctgtac

SEQ ID NO: 27916 - DNA, 25 bp, Homo sapiens
aacatctagttccctgcttgatggg

SEQ ID NO: 27917 - DNA, 25 bp, Homo sapiens
acacctgcttgatcctcagatgtgg

SEQ ID NO: 27918 - DNA, 25 bp, Homo sapiens
agggaggtaggcactgcctcagtct

SEQ ID NO: 27919 - DNA, 25 bp, Homo sapiens
ctccagggacccttagatcacatca

SEQ ID NO: 27920 - DNA, 25 bp, Homo sapiens
gatagcctcccactaggactgggag

SEQ ID NO: 27921 - DNA, 25 bp, Homo sapiens
gatcttctcaaacatctagttccct

SEQ ID NO: 27922 - DNA, 25 bp, Homo sapiens
gccaggccccaggttaggaatagtg

SEQ ID NO: 27923 - DNA, 25 bp, Homo sapiens
ggagccacccactgaaagggctgca

SEQ ID NO: 27924 - DNA, 25 bp, Homo sapiens
gtcaggatgttgtttgatcttctca

SEQ ID NO: 27925 - DNA, 25 bp, Homo sapiens
aacagtagacaaatgcagcagcaag

SEQ ID NO: 27926 - DNA, 25 bp, Homo sapiens
agaatattgtcctcattgcatgtgt

SEQ ID NO: 27927 - DNA, 25 bp, Homo sapiens
atactagttgcactgctctgtttat

SEQ ID NO: 27928 - DNA, 25 bp, Homo sapiens
cttacggccaagtttcttctagtat

SEQ ID NO: 27929 - DNA, 25 bp, Homo sapiens
ggattgttccaaatactagttgcac

SEQ ID NO: 27930 - DNA, 25 bp, Homo sapiens
ggccaagtttcttctagtatgatgg

SEQ ID NO: 27931 - DNA, 25 bp, Homo sapiens
gttccaaatactagttgcactgctc

SEQ ID NO: 27932 - DNA, 25 bp, Homo sapiens
gttgcactgctctgtttataattgt

SEQ ID NO: 27933 - DNA, 25 bp, Homo sapiens
taacactgtaaggattgttccaaat

SEQ ID NO: 27934 - DNA, 25 bp, Homo sapiens
tagcagaatattgtcctcattgcat

SEQ ID NO: 27935 - DNA, 25 bp, Homo sapiens
tattgtcctcattgcatgtgtagtt

SEQ ID NO: 27936 - DNA, 25 bp, Homo sapiens
atatgagcagctgtcctctgaagcc

SEQ ID NO: 27937 - DNA, 25 bp, Homo sapiens
atgagggcttccaatgtgctgcccc

SEQ ID NO: 27938 - DNA, 25 bp, Homo sapiens
gaggctgcccgaatttgtgccaata

SEQ ID NO: 27939 - DNA, 25 bp, Homo sapiens
gggccctgcactcatgagggcttcc

SEQ ID NO: 27940 - DNA, 25 bp, Homo sapiens
gtggccctctggacaagtggcgggc

SEQ ID NO: 27941 - DNA, 25 bp, Homo sapiens
tccgctttgtggccacatggtgtca

SEQ ID NO: 27942 - DNA, 25 bp, Homo sapiens
tgacaggctccaaacaggcatgcga

SEQ ID NO: 27943 - DNA, 25 bp, Homo sapiens
tgcgcagggccaagttcaagtttcc

SEQ ID NO: 27944 - DNA, 25 bp, Homo sapiens
tggaaagccccagggcactgtggcc

SEQ ID NO: 27945 - DNA, 25 bp, Homo sapiens
tggccaagttatcatgtccatccgc

SEQ ID NO: 27946 - DNA, 25 bp, Homo sapiens
tggctgaaaagcggctcatcccaga

SEQ ID NO: 27947 - DNA, 25 bp, Homo sapiens
aaaatgatgtagtccctcaacttgg

SEQ ID NO: 27948 - DNA, 25 bp, Homo sapiens
attctacattcttgcttccttaaat

SEQ ID NO: 27949 - DNA, 25 bp, Homo sapiens
ccgacccgttgccatgattaagaga

SEQ ID NO: 27950 - DNA, 25 bp, Homo sapiens
gaagtagtgtctgccatacatgtta

SEQ ID NO: 27951 - DNA, 25 bp, Homo sapiens
gccttaacacagctctatacctaga

SEQ ID NO: 27952 - DNA, 25 bp, Homo sapiens
ggtgtcaccagattttggtcaccaa

SEQ ID NO: 27953 - DNA, 25 bp, Homo sapiens
gtaaatatctactgtttgccaggca

SEQ ID NO: 27954 - DNA, 25 bp, Homo sapiens
tcccccttctagagtgcttcaaaat

SEQ ID NO: 27955 - DNA, 25 bp, Homo sapiens
tctatacctagaagcagccagccca

SEQ ID NO: 27956 - DNA, 25 bp, Homo sapiens
tgcagtcacatttaatcacatcccc

SEQ ID NO: 27957 - DNA, 25 bp, Homo sapiens
tggtcaccaatgagtacccgacccg

SEQ ID NO: 27958 - DNA, 25 bp, Homo sapiens
aaaccttccatgtcaagattcagct

SEQ ID NO: 27959 - DNA, 25 bp, Homo sapiens
acagcccctaagtcaacttagcatt

SEQ ID NO: 27960 - DNA, 25 bp, Homo sapiens
agaaagtgagcagtgttagcttagt

SEQ ID NO: 27961 - DNA, 25 bp, Homo sapiens
agcttagttctcttttgatgtaggt

SEQ ID NO: 27962 - DNA, 25 bp, Homo sapiens
atttgcatacattcttcaagatccc

SEQ ID NO: 27963 - DNA, 25 bp, Homo sapiens
caccctggatttgcatacattcttc

SEQ ID NO: 27964 - DNA, 25 bp, Homo sapiens
ccatgtcaagattcagctagtggcc

SEQ ID NO: 27965 - DNA, 25 bp, Homo sapiens
cttcactgcaccctggatttgcata

SEQ ID NO: 27966 - DNA, 25 bp, Homo sapiens
gatgcagtgccaggaacccttaaac

SEQ ID NO: 27967 - DNA, 25 bp, Homo sapiens
ggcattagctaaaaccttccatgtc

SEQ ID NO: 27968 - DNA, 25 bp, Homo sapiens
ttgtgcattctagagtgcatatatt

SEQ ID NO: 27969 - DNA, 25 bp, Homo sapiens
aagaacaagctggattttctccgcc

SEQ ID NO: 27970 - DNA, 25 bp, Homo sapiens
cggaagcaacattgacctctgcgtc

SEQ ID NO: 27971 - DNA, 25 bp, Homo sapiens
gacctctgcgtcatcagcaagaaca

SEQ ID NO: 27972 - DNA, 25 bp, Homo sapiens
gaggcccagtaagacactcatgtgg

SEQ ID NO: 27973 - DNA, 25 bp, Homo sapiens
gagtagatgttactggacctcacct

SEQ ID NO: 27974 - DNA, 25 bp, Homo sapiens
ggactactgcagtcctcactgagaa

SEQ ID NO: 27975 - DNA, 25 bp, Homo sapiens
ggctccttggcagcaatggctgtat

SEQ ID NO: 27976 - DNA, 25 bp, Homo sapiens
ggcttggccggtacaggtgtgagaa

SEQ ID NO: 27977 - DNA, 25 bp, Homo sapiens
gttacattggtgcagccctagtttt

SEQ ID NO: 27978 - DNA, 25 bp, Homo sapiens
tgagcgaagccatcgcagctggcat

SEQ ID NO: 27979 - DNA, 25 bp, Homo sapiens
ttatgtcaccatgggttctggctcc

SEQ ID NO: 27980 - DNA, 25 bp, Homo sapiens
atataggatcagctccttgacctct

SEQ ID NO: 27981 - DNA, 25 bp, Homo sapiens
atcatgttctagttgcttgaccctg

SEQ ID NO: 27982 - DNA, 25 bp, Homo sapiens
cagtgaaatgcctcttggtcctgtc

SEQ ID NO: 27983 - DNA, 25 bp, Homo sapiens
cctgggggctctagtcattccagtg

SEQ ID NO: 27984 - DNA, 25 bp, Homo sapiens
cttgaccctgccacatgggtccagt

SEQ ID NO: 27985 - DNA, 25 bp, Homo sapiens
gaccccagaggatctggctctaggt

SEQ ID NO: 27986 - DNA, 25 bp, Homo sapiens
gcataactgtactaaatcctttttc

SEQ ID NO: 27987 - DNA, 25 bp, Homo sapiens
ggaaccatgctaagccatgaccagt

SEQ ID NO: 27988 - DNA, 25 bp, Homo sapiens
ggcggttgaaatagtcccacatgtg

SEQ ID NO: 27989 - DNA, 25 bp, Homo sapiens
ggtgtgtgtattagaatcccttcct

SEQ ID NO: 27990 - DNA, 25 bp, Homo sapiens
tggtgatgtgacaactgtttcctcc

SEQ ID NO: 27991 - DNA, 25 bp, Homo sapiens
actttgttcactgtcctgtgtcaga

SEQ ID NO: 27992 - DNA, 25 bp, Homo sapiens
agatagggatattggcccctcactg

SEQ ID NO: 27993 - DNA, 25 bp, Homo sapiens
agctccacccttttctgagagttat

SEQ ID NO: 27994 - DNA, 25 bp, Homo sapiens
caaccctgtgatcagaacctccaaa

SEQ ID NO: 27995 - DNA, 25 bp, Homo sapiens
cactctcagccatagcactttgttc

SEQ ID NO: 27996 - DNA, 25 bp, Homo sapiens
gaaagggttgctgctgtcagccttg

SEQ ID NO: 27997 - DNA, 25 bp, Homo sapiens
gctgaaactggtctactgtgtctct

SEQ ID NO: 27998 - DNA, 25 bp, Homo sapiens
ggttttctcttcatgtaagtccttg

SEQ ID NO: 27999 - DNA, 25 bp, Homo sapiens
gtgttctcctactgcaaatattttc

SEQ ID NO: 28000 - DNA, 25 bp, Homo sapiens
tgtgtcagagcactgagctccaccc

SEQ ID NO: 28001 - DNA, 25 bp, Homo sapiens
tgttcttagcactttaattcctgtc

SEQ ID NO: 28002 - DNA, 25 bp, Homo sapiens
actccatggggccaaatctgcctga

SEQ ID NO: 28003 - DNA, 25 bp, Homo sapiens
actcttgagggttgattatgctgca

SEQ ID NO: 28004 - DNA, 25 bp, Homo sapiens
agcaggtacttctaccattaaggtg

SEQ ID NO: 28005 - DNA, 25 bp, Homo sapiens
catgttgctttgctttcttgtggac

SEQ ID NO: 28006 - DNA, 25 bp, Homo sapiens
gaaagatacgccatcctttcaaacc

SEQ ID NO: 28007 - DNA, 25 bp, Homo sapiens
gaaatccctgagtatcaggccttgt

SEQ ID NO: 28008 - DNA, 25 bp, Homo sapiens
gactgacaaaaactccatggggcca

SEQ ID NO: 28009 - DNA, 25 bp, Homo sapiens
ggacagcttgtagtttgccaggatt

SEQ ID NO: 28010 - DNA, 25 bp, Homo sapiens
tatagcgtgtgtgcaaactcttgag

SEQ ID NO: 28011 - DNA, 25 bp, Homo sapiens
tccataccccttcaaacatgttgct

SEQ ID NO: 28012 - DNA, 25 bp, Homo sapiens
ttgactttttgcacttctgtatata

SEQ ID NO: 28013 - DNA, 25 bp, Homo sapiens
aaacgcgcacacaactctagagagt

SEQ ID NO: 28014 - DNA, 25 bp, Homo sapiens
aggccttgaacacggattatcccca

SEQ ID NO: 28015 - DNA, 25 bp, Homo sapiens
cccccagtgagctctgatttctaga

SEQ ID NO: 28016 - DNA, 25 bp, Homo sapiens
ccttctcagtcaagtctgccggatg

SEQ ID NO: 28017 - DNA, 25 bp, Homo sapiens
cttagtatttgggtaccctgctctt

SEQ ID NO: 28018 - DNA, 25 bp, Homo sapiens
gcataagtaatctcctgtcctttgg

SEQ ID NO: 28019 - DNA, 25 bp, Homo sapiens
ggaatggaacccttgctatagtagt

SEQ ID NO: 28020 - DNA, 25 bp, Homo sapiens
ggaggcataggccatttcaggcagc

SEQ ID NO: 28021 - DNA, 25 bp, Homo sapiens
gtcctttggcagaagctcctttaga

SEQ ID NO: 28022 - DNA, 25 bp, Homo sapiens
tgagtattgtttgtgctaagcattg

SEQ ID NO: 28023 - DNA, 25 bp, Homo sapiens
ttttccttaaaacgcgcacacaact

SEQ ID NO: 28024 - DNA, 25 bp, Homo sapiens
aagacaatattgaacaaccccctat

SEQ ID NO: 28025 - DNA, 25 bp, Homo sapiens
agaggcttgagactttcctttgtgt

SEQ ID NO: 28026 - DNA, 25 bp, Homo sapiens
catgcttgtggccaactgtttcact

SEQ ID NO: 28027 - DNA, 25 bp, Homo sapiens
ctccaagcttgggtcagtgtgttaa

SEQ ID NO: 28028 - DNA, 25 bp, Homo sapiens
gaattgtcaggcaccctacaggaag

SEQ ID NO: 28029 - DNA, 25 bp, Homo sapiens
gacctgcacagcttggttagaccta

SEQ ID NO: 28030 - DNA, 25 bp, Homo sapiens
gcttatcagctattcagacatctcc

SEQ ID NO: 28031 - DNA, 25 bp, Homo sapiens
taagcctaactttgtcgctagtcct

SEQ ID NO: 28032 - DNA, 25 bp, Homo sapiens
tacaggaaggcctgccatgcttgtg

SEQ ID NO: 28033 - DNA, 25 bp, Homo sapiens
tcattccttcttagttgacctgcac

SEQ ID NO: 28034 - DNA, 25 bp, Homo sapiens
ttctggcttcgtttatggtcttcat

SEQ ID NO: 28035 - DNA, 25 bp, Homo sapiens
aagaaacggtgctttgctctgtgtt

SEQ ID NO: 28036 - DNA, 25 bp, Homo sapiens
gagaatacctgtttagtgttgcact

SEQ ID NO: 28037 - DNA, 25 bp, Homo sapiens
ggagcctttctggatttgggatgtg

SEQ ID NO: 28038 - DNA, 25 bp, Homo sapiens
taatgtagcctgcctctatttgttg

SEQ ID NO: 28039 - DNA, 25 bp, Homo sapiens
tagtcacctcggggattttttccat

SEQ ID NO: 28040 - DNA, 25 bp, Homo sapiens
tatggcttgtcagagctcattcgac

SEQ ID NO: 28041 - DNA, 25 bp, Homo sapiens
tgagcatggggtgcaggagcctttc

SEQ ID NO: 28042 - DNA, 25 bp, Homo sapiens
tgcagctgtgccacaaattctcctt

SEQ ID NO: 28043 - DNA, 25 bp, Homo sapiens
tgcctcatctcctatctttagtgaa

SEQ ID NO: 28044 - DNA, 25 bp, Homo sapiens
tgctcctgatttccctggaggttct

SEQ ID NO: 28045 - DNA, 25 bp, Homo sapiens
tgtgtgtatttattccaccgtggga

SEQ ID NO: 28046 - DNA, 25 bp, Homo sapiens
aaagaatgacgacatccgcatcctc

SEQ ID NO: 28047 - DNA, 25 bp, Homo sapiens
atcaggtcgatacggccggaagggt

SEQ ID NO: 28048 - DNA, 25 bp, Homo sapiens
atgagggagactgttcacctgctgt

SEQ ID NO: 28049 - DNA, 25 bp, Homo sapiens
caacttcactgtatcctcaatgcat

SEQ ID NO: 28050 - DNA, 25 bp, Homo sapiens
cgagcagtactattccactcagatt

SEQ ID NO: 28051 - DNA, 25 bp, Homo sapiens
ctcaggtgtccctcatcattaacta

SEQ ID NO: 28052 - DNA, 25 bp, Homo sapiens
ctgggccagggggttggatgtccct

SEQ ID NO: 28053 - DNA, 25 bp, Homo sapiens
cttctcataaatggcctgccgtctc

SEQ ID NO: 28054 - DNA, 25 bp, Homo sapiens
gacatccgcatcctcagagatatcg

SEQ ID NO: 28055 - DNA, 25 bp, Homo sapiens
gatgccgatgaacgttgctgatctt

SEQ ID NO: 28056 - DNA, 25 bp, Homo sapiens
gccagccgagtgcttatttctacag

SEQ ID NO: 28057 - DNA, 25 bp, Homo sapiens
aagcacctccatattatgacttggt

SEQ ID NO: 28058 - DNA, 25 bp, Homo sapiens
agcacttaagcacctccatattatg

SEQ ID NO: 28059 - DNA, 25 bp, Homo sapiens
ccatggactcctggaaggcacagag

SEQ ID NO: 28060 - DNA, 25 bp, Homo sapiens
ccctctcccaccaagactatgagaa

SEQ ID NO: 28061 - DNA, 25 bp, Homo sapiens
cctttcttctgttcaaagttttctg

SEQ ID NO: 28062 - DNA, 25 bp, Homo sapiens
cgggaaggcaggtgtgactccaggc

SEQ ID NO: 28063 - DNA, 25 bp, Homo sapiens
cttctcccctgtgacgggaaggcag

SEQ ID NO: 28064 - DNA, 25 bp, Homo sapiens
gactatgagaacttcagctgatagc

SEQ ID NO: 28065 - DNA, 25 bp, Homo sapiens
gggctccccagatgaggatgcaggg

SEQ ID NO: 28066 - DNA, 25 bp, Homo sapiens
taatttcggggatttctgtggtagg

SEQ ID NO: 28067 - DNA, 25 bp, Homo sapiens
tatgacttggtgggtcaccccttag

SEQ ID NO: 28068 - DNA, 25 bp, Homo sapiens
aaaaagcgactgtgccaattccatc

SEQ ID NO: 28069 - DNA, 25 bp, Homo sapiens
aacaaaacccaagtcaccatgtact

SEQ ID NO: 28070 - DNA, 25 bp, Homo sapiens
acaattcgtactccccaatggtgga

SEQ ID NO: 28071 - DNA, 25 bp, Homo sapiens
agatttacccagtcaatgccatttc

SEQ ID NO: 28072 - DNA, 25 bp, Homo sapiens
caggtggttctgatggctttgtaaa

SEQ ID NO: 28073 - DNA, 25 bp, Homo sapiens
gtatgccttcaaatgtcacagacta

SEQ ID NO: 28074 - DNA, 25 bp, Homo sapiens
taatgatgggactacgcttgcaata

SEQ ID NO: 28075 - DNA, 25 bp, Homo sapiens
tcgcatcacttgccttcagtaatga

SEQ ID NO: 28076 - DNA, 25 bp, Homo sapiens
tgccatttcttttcacaatatccac

SEQ ID NO: 28077 - DNA, 25 bp, Homo sapiens
tggtatcttcattcgccaagtgaca

SEQ ID NO: 28078 - DNA, 25 bp, Homo sapiens
ttggacccaagccctgaggtacaga

SEQ ID NO: 28079 - DNA, 25 bp, Homo sapiens
aaggcagggccacttttgaagtctt

SEQ ID NO: 28080 - DNA, 25 bp, Homo sapiens
agctaccccttgtgggcaaaggcag

SEQ ID NO: 28081 - DNA, 25 bp, Homo sapiens
ccaaagatgtcctgactttgccccc

SEQ ID NO: 28082 - DNA, 25 bp, Homo sapiens
ctcccttgtctcagatggtgtgtcc

SEQ ID NO: 28083 - DNA, 25 bp, Homo sapiens
cttccctcagatttccattgtgtgg

SEQ ID NO: 28084 - DNA, 25 bp, Homo sapiens
gcccagggtcgtctttgtgtatggg

SEQ ID NO: 28085 - DNA, 25 bp, Homo sapiens
ggtcagggggagtctttgcaccaaa

SEQ ID NO: 28086 - DNA, 25 bp, Homo sapiens
ggtggcaggaatacttcacctttcc

SEQ ID NO: 28087 - DNA, 25 bp, Homo sapiens
tcccccagcacagatgaggagcagc

SEQ ID NO: 28088 - DNA, 25 bp, Homo sapiens
tcctgggttctggggcatcagccag

SEQ ID NO: 28089 - DNA, 25 bp, Homo sapiens
tgtgtccagcactcgattgttgtaa

SEQ ID NO: 28090 - DNA, 25 bp, Homo sapiens
aaggcgaggacggtgtgtgggtggc

SEQ ID NO: 28091 - DNA, 25 bp, Homo sapiens
agaggagtcgctacacttaccttga

SEQ ID NO: 28092 - DNA, 25 bp, Homo sapiens
agggctcgaccacttcaacaaagcc

SEQ ID NO: 28093 - DNA, 25 bp, Homo sapiens
gaggattcgctgctggtgttaattt

SEQ ID NO: 28094 - DNA, 25 bp, Homo sapiens
gcaactgtcagcgcaatgggggaga

SEQ ID NO: 28095 - DNA, 25 bp, Homo sapiens
gccccttaacagcctagaactttgg

SEQ ID NO: 28096 - DNA, 25 bp, Homo sapiens
gccctgcagctagcaagtcttgtgt

SEQ ID NO: 28097 - DNA, 25 bp, Homo sapiens
gctgtccctagtgggcacgagtggc

SEQ ID NO: 28098 - DNA, 25 bp, Homo sapiens
gtcttgtgtttaggctcgtctgacc

SEQ ID NO: 28099 - DNA, 25 bp, Homo sapiens
tccaagctggtgtgttcaaggcgag

SEQ ID NO: 28100 - DNA, 25 bp, Homo sapiens
tcgtctgacctatttccttcagtta

SEQ ID NO: 28101 - DNA, 25 bp, Homo sapiens
aaataattccttggactgcctggtg

SEQ ID NO: 28102 - DNA, 25 bp, Homo sapiens
aagtcatcgtgaccaatgttacagt

SEQ ID NO: 28103 - DNA, 25 bp, Homo sapiens
aatactcagctgtccctttaaaaat

SEQ ID NO: 28104 - DNA, 25 bp, Homo sapiens
acgattcctcatatccaaggctact

SEQ ID NO: 28105 - DNA, 25 bp, Homo sapiens
aggctacttttgaagatccctctgc

SEQ ID NO: 28106 - DNA, 25 bp, Homo sapiens
agtatctaacattaccattcacgtt

SEQ ID NO: 28107 - DNA, 25 bp, Homo sapiens
ctcactcatctcttttacctaaatt

SEQ ID NO: 28108 - DNA, 25 bp, Homo sapiens
ctggacaaggccaagcttttcttta

SEQ ID NO: 28109 - DNA, 25 bp, Homo sapiens
gtctccctgatctgaactatttgct

SEQ ID NO: 28110 - DNA, 25 bp, Homo sapiens
tattaaaacctcagcatgtctccct

SEQ ID NO: 28111 - DNA, 25 bp, Homo sapiens
tgaatgatgagcctatgtccctgcc

SEQ ID NO: 28112 - DNA, 25 bp, Homo sapiens
atgcccgttccatctatgttggcaa

SEQ ID NO: 28113 - DNA, 25 bp, Homo sapiens
cgctctcgattctacagtggtttta

SEQ ID NO: 28114 - DNA, 25 bp, Homo sapiens
cttccttggccttagatgagtccct

SEQ ID NO: 28115 - DNA, 25 bp, Homo sapiens
gaaccaacagaccaggcatcagcac

SEQ ID NO: 28116 - DNA, 25 bp, Homo sapiens
gaagatggaggctgatgcccgttcc

SEQ ID NO: 28117 - DNA, 25 bp, Homo sapiens
gatgaatatgagtccacctccaggc

SEQ ID NO: 28118 - DNA, 25 bp, Homo sapiens
gcccggtgatcatgtccattgagga

SEQ ID NO: 28119 - DNA, 25 bp, Homo sapiens
ggaagctcactttcatggctgtggt

SEQ ID NO: 28120 - DNA, 25 bp, Homo sapiens
gtcaaccgtgttaccatactgtgtg

SEQ ID NO: 28121 - DNA, 25 bp, Homo sapiens
gtgtgacaaatttagtggccatccc

SEQ ID NO: 28122 - DNA, 25 bp, Homo sapiens
tagagcgacatcatggtattcccct

SEQ ID NO: 28123 - DNA, 25 bp, Homo sapiens
aaagaccaacaaatctcaagcccta

SEQ ID NO: 28124 - DNA, 25 bp, Homo sapiens
aaatggatcttttatggccctatga

SEQ ID NO: 28125 - DNA, 25 bp, Homo sapiens
aagcatgagagtgtctaggcctttg

SEQ ID NO: 28126 - DNA, 25 bp, Homo sapiens
atattaggctacgtattccacattg

SEQ ID NO: 28127 - DNA, 25 bp, Homo sapiens
gcacgctggtgctaagtatttttta

SEQ ID NO: 28128 - DNA, 25 bp, Homo sapiens
gccattcatgcttctatgcatatta

SEQ ID NO: 28129 - DNA, 25 bp, Homo sapiens
gccctatgatctatcctttacttga

SEQ ID NO: 28130 - DNA, 25 bp, Homo sapiens
ggaggctaagtattgctttctacaa

SEQ ID NO: 28131 - DNA, 25 bp, Homo sapiens
gtttggcatataggaagcacgctgg

SEQ ID NO: 28132 - DNA, 25 bp, Homo sapiens
taggcctttgaatggcatatgccat

SEQ ID NO: 28133 - DNA, 25 bp, Homo sapiens
tctgggaaatgcatctggaggctaa

SEQ ID NO: 28134 - DNA, 25 bp, Homo sapiens
aataaccgagctcttctttggggat

SEQ ID NO: 28135 - DNA, 25 bp, Homo sapiens
aatctgataaataaccgagctcttc

SEQ ID NO: 28136 - DNA, 25 bp, Homo sapiens
atcgcttggttcagtttcattcagc

SEQ ID NO: 28137 - DNA, 25 bp, Homo sapiens
cagccaagatgctgcggaatctgct

SEQ ID NO: 28138 - DNA, 25 bp, Homo sapiens
ccaagaagcaggagtgacttcagtc

SEQ ID NO: 28139 - DNA, 25 bp, Homo sapiens
ccgagctcttctttggggatcaata

SEQ ID NO: 28140 - DNA, 25 bp, Homo sapiens
gataaataaccgagctcttctttgg

SEQ ID NO: 28141 - DNA, 25 bp, Homo sapiens
gcaatcgcttggttcagtttcattc

SEQ ID NO: 28142 - DNA, 25 bp, Homo sapiens
gctcttctttggggatcaatattta

SEQ ID NO: 28143 - DNA, 25 bp, Homo sapiens
tcatttcccaagaagcaggagtgac

SEQ ID NO: 28144 - DNA, 25 bp, Homo sapiens
tcccagcaatcgcttggttcagttt

SEQ ID NO: 28145 - DNA, 25 bp, Homo sapiens
actcctccaacagacaacggacgga

SEQ ID NO: 28146 - DNA, 25 bp, Homo sapiens
agagctagtgccttaggtgggggaa

SEQ ID NO: 28147 - DNA, 25 bp, Homo sapiens
atgccgctggtgctcaggaagagct

SEQ ID NO: 28148 - DNA, 25 bp, Homo sapiens
gacaacggacggacggatgccgctg

SEQ ID NO: 28149 - DNA, 25 bp, Homo sapiens
gcccccagactgtggggttgggacg

SEQ ID NO: 28150 - DNA, 25 bp, Homo sapiens
gctcaggaagagctagtgccttagg

SEQ ID NO: 28151 - DNA, 25 bp, Homo sapiens
ggaagagctagtgccttaggtgggg

SEQ ID NO: 28152 - DNA, 25 bp, Homo sapiens
ggaaggcaggactcacgactgagag

SEQ ID NO: 28153 - DNA, 25 bp, Homo sapiens
ggcaggactcacgactgagagagag

SEQ ID NO: 28154 - DNA, 25 bp, Homo sapiens
tcaggggctgtaagggaaggcccac

SEQ ID NO: 28155 - DNA, 25 bp, Homo sapiens
tccctccctcaggggctgtaaggga

SEQ ID NO: 28156 - DNA, 25 bp, Homo sapiens
agaagccacgatgtgctctgtatcc

SEQ ID NO: 28157 - DNA, 25 bp, Homo sapiens
agctttacacagctgtccttacttc

SEQ ID NO: 28158 - DNA, 25 bp, Homo sapiens
cttacttcctaacatctttctgata

SEQ ID NO: 28159 - DNA, 25 bp, Homo sapiens
gatccatgaaccagaacctcacatc

SEQ ID NO: 28160 - DNA, 25 bp, Homo sapiens
gcccagccagatgagtgctctgtgg

SEQ ID NO: 28161 - DNA, 25 bp, Homo sapiens
ggaatcttggcgttcagcagagtca

SEQ ID NO: 28162 - DNA, 25 bp, Homo sapiens
ggtaactgctttgcttcttgagtag

SEQ ID NO: 28163 - DNA, 25 bp, Homo sapiens
gtggacccacagcctaagctgagtg

SEQ ID NO: 28164 - DNA, 25 bp, Homo sapiens
taagctgagtgtgaccccagaagcc

SEQ ID NO: 28165 - DNA, 25 bp, Homo sapiens
tacttttcagcctcaagctttacac

SEQ ID NO: 28166 - DNA, 25 bp, Homo sapiens
tgccgggtgttgtatgtgtggtgac

SEQ ID NO: 28167 - DNA, 25 bp, Homo sapiens
acaatgtacaaactttctgcccact

SEQ ID NO: 28168 - DNA, 25 bp, Homo sapiens
atccatttcttgcccttcaataatt

SEQ ID NO: 28169 - DNA, 25 bp, Homo sapiens
atctcttctccatcatgtacttagt

SEQ ID NO: 28170 - DNA, 25 bp, Homo sapiens
cactgatttttatgctactccttgt

SEQ ID NO: 28171 - DNA, 25 bp, Homo sapiens
gaatgtgtaccccgtttatgtgaag

SEQ ID NO: 28172 - DNA, 25 bp, Homo sapiens
gaccccctttggagctgataagtac

SEQ ID NO: 28173 - DNA, 25 bp, Homo sapiens
gccttttgttgtttacatgctcttc

SEQ ID NO: 28174 - DNA, 25 bp, Homo sapiens
taatctagggaccccctttggagct

SEQ ID NO: 28175 - DNA, 25 bp, Homo sapiens
tgctcttctgcccagactgttagta

SEQ ID NO: 28176 - DNA, 25 bp, Homo sapiens
tgtacttagtatttcccattaacct

SEQ ID NO: 28177 - DNA, 25 bp, Homo sapiens
ttcccattaacctacacactgattt

SEQ ID NO: 28178 - DNA, 25 bp, Homo sapiens
aactttttttcaattgccagctact

SEQ ID NO: 28179 - DNA, 25 bp, Homo sapiens
cagcacttcctttggtgtgtttcct

SEQ ID NO: 28180 - DNA, 25 bp, Homo sapiens
catcgactcacacactatgatcatg

SEQ ID NO: 28181 - DNA, 25 bp, Homo sapiens
ggctggagctctgctagggacagaa

SEQ ID NO: 28182 - DNA, 25 bp, Homo sapiens
gtcacattcatcacaggtttcatac

SEQ ID NO: 28183 - DNA, 25 bp, Homo sapiens
taaggtatgtgctgtcctattgagc

SEQ ID NO: 28184 - DNA, 25 bp, Homo sapiens
tagtctctataaccaatacctttgt

SEQ ID NO: 28185 - DNA, 25 bp, Homo sapiens
tcataccaacacaggcttcagcact

SEQ ID NO: 28186 - DNA, 25 bp, Homo sapiens
tgtgtttcctgtcccagtgaagttg

SEQ ID NO: 28187 - DNA, 25 bp, Homo sapiens
tgttctaattgagctcacccaggct

SEQ ID NO: 28188 - DNA, 25 bp, Homo sapiens
ttaaccctaactacttgctcgaaga

SEQ ID NO: 28189 - DNA, 25 bp, Homo sapiens
ataccatgtacataattcttgctat

SEQ ID NO: 28190 - DNA, 25 bp, Homo sapiens
attctggtttatttcctagactgtt

SEQ ID NO: 28191 - DNA, 25 bp, Homo sapiens
attggcctgtgaagcattggacatt

SEQ ID NO: 28192 - DNA, 25 bp, Homo sapiens
gaagtgcaatactgagtgtgcctca

SEQ ID NO: 28193 - DNA, 25 bp, Homo sapiens
ggactaagaacgatgctggctttca

SEQ ID NO: 28194 - DNA, 25 bp, Homo sapiens
gtacaattgcatcacgggtggggat

SEQ ID NO: 28195 - DNA, 25 bp, Homo sapiens
gtgaggtgtttgcatgtggccatta

SEQ ID NO: 28196 - DNA, 25 bp, Homo sapiens
gtggccattaccgtcattggcctgt

SEQ ID NO: 28197 - DNA, 25 bp, Homo sapiens
tactgcctttttgtaatcctgtaca

SEQ ID NO: 28198 - DNA, 25 bp, Homo sapiens
tataaaagaatcgccatgcccatgg

SEQ ID NO: 28199 - DNA, 25 bp, Homo sapiens
tgtgcctcattatcttgcagctgta

SEQ ID NO: 28200 - DNA, 25 bp, Homo sapiens
aagtgcgcttcggtacagcacgggt

SEQ ID NO: 28201 - DNA, 25 bp, Homo sapiens
atctcccttgctcatttggatgcgt

SEQ ID NO: 28202 - DNA, 25 bp, Homo sapiens
cacacattgcagactcttaacgcag

SEQ ID NO: 28203 - DNA, 25 bp, Homo sapiens
ccaccgtctttgattcaccgggatg

SEQ ID NO: 28204 - DNA, 25 bp, Homo sapiens
ctgctcccgcgatgtggaagtgtca

SEQ ID NO: 28205 - DNA, 25 bp, Homo sapiens
ctttgtattgcccactcatttgtat

SEQ ID NO: 28206 - DNA, 25 bp, Homo sapiens
ggacttcaaacttctgctgagacct

SEQ ID NO: 28207 - DNA, 25 bp, Homo sapiens
tacaaaaagactggctaacccctct

SEQ ID NO: 28208 - DNA, 25 bp, Homo sapiens
tgtcacacggcacctgtacaaaaag

SEQ ID NO: 28209 - DNA, 25 bp, Homo sapiens
tgtttttctcagcgcagttttgttt

SEQ ID NO: 28210 - DNA, 25 bp, Homo sapiens
ttggatgcgtcaccttaattctcct

SEQ ID NO: 28211 - DNA, 25 bp, Homo sapiens
agcacttgatgaactcggggtacta

SEQ ID NO: 28212 - DNA, 25 bp, Homo sapiens
ccccactctcttatttgtgcattcg

SEQ ID NO: 28213 - DNA, 25 bp, Homo sapiens
ccctcttggcgtgagttgcgtattc

SEQ ID NO: 28214 - DNA, 25 bp, Homo sapiens
ctggcatgactgtttgtttctccaa

SEQ ID NO: 28215 - DNA, 25 bp, Homo sapiens
gagtcatgcggattatccactcgcc

SEQ ID NO: 28216 - DNA, 25 bp, Homo sapiens
gccagtgtgtcttacttggttgctg

SEQ ID NO: 28217 - DNA, 25 bp, Homo sapiens
ggatgcctgcgtgtggtttaggtgt

SEQ ID NO: 28218 - DNA, 25 bp, Homo sapiens
tagcaggatgtctggctgcacctgg

SEQ ID NO: 28219 - DNA, 25 bp, Homo sapiens
tctccactcagtaccttggatcaga

SEQ ID NO: 28220 - DNA, 25 bp, Homo sapiens
ttggttgctgaacatcttgccacct

SEQ ID NO: 28221 - DNA, 25 bp, Homo sapiens
ttgtgcttctcacctttgggtggga

SEQ ID NO: 28222 - DNA, 25 bp, Homo sapiens
aaaggcattcaatctctaggtgtaa

SEQ ID NO: 28223 - DNA, 25 bp, Homo sapiens
aaatggtttgcacagctttcttaaa

SEQ ID NO: 28224 - DNA, 25 bp, Homo sapiens
atggatgacccttctatttccagga

SEQ ID NO: 28225 - DNA, 25 bp, Homo sapiens
catagagtcctccattacagtcaag

SEQ ID NO: 28226 - DNA, 25 bp, Homo sapiens
gaatgtctcctggacctaattgcca

SEQ ID NO: 28227 - DNA, 25 bp, Homo sapiens
gtactacagtttattcgcaccaggt

SEQ ID NO: 28228 - DNA, 25 bp, Homo sapiens
gttgctgggactccagcccataagc

SEQ ID NO: 28229 - DNA, 25 bp, Homo sapiens
tatctgcccacggcttgaactgggg

SEQ ID NO: 28230 - DNA, 25 bp, Homo sapiens
tattccctgggcttttgaggcaata

SEQ ID NO: 28231 - DNA, 25 bp, Homo sapiens
tgaactggggaacgactgggactct

SEQ ID NO: 28232 - DNA, 25 bp, Homo sapiens
tgaaggacagtacccatctatctgc

SEQ ID NO: 28233 - DNA, 25 bp, Homo sapiens
aaaagcatgtcctttgcaacctgat

SEQ ID NO: 28234 - DNA, 25 bp, Homo sapiens
aagtgtctagttcttgctaaaatca

SEQ ID NO: 28235 - DNA, 25 bp, Homo sapiens
aatggtgccatattgtcactccttc

SEQ ID NO: 28236 - DNA, 25 bp, Homo sapiens
attgttgtactgctgccatttttat

SEQ ID NO: 28237 - DNA, 25 bp, Homo sapiens
caagtcattgcattgtgttctaatt

SEQ ID NO: 28238 - DNA, 25 bp, Homo sapiens
gtgtttgttccaattagctttgttg

SEQ ID NO: 28239 - DNA, 25 bp, Homo sapiens
taggttgtcccctaaagattctgaa

SEQ ID NO: 28240 - DNA, 25 bp, Homo sapiens
tcatctttgaataacgtctccttgt

SEQ ID NO: 28241 - DNA, 25 bp, Homo sapiens
tctccttgtttaccctggtattcta

SEQ ID NO: 28242 - DNA, 25 bp, Homo sapiens
tgcttagattgttgtactgctgcca

SEQ ID NO: 28243 - DNA, 25 bp, Homo sapiens
tggagaattctttaggttgtcccct

SEQ ID NO: 28244 - DNA, 25 bp, Homo sapiens
agctatccttccatgatctgatcat

SEQ ID NO: 28245 - DNA, 25 bp, Homo sapiens
atatcctttcatgtatatttccaca

SEQ ID NO: 28246 - DNA, 25 bp, Homo sapiens
attgccagcagcacacatcagatgc

SEQ ID NO: 28247 - DNA, 25 bp, Homo sapiens
ccggaggactggagcagtccctcct

SEQ ID NO: 28248 - DNA, 25 bp, Homo sapiens
cggcctgtgaccaaggtcggggagg

SEQ ID NO: 28249 - DNA, 25 bp, Homo sapiens
gaatttagtagtccatgccttctca

SEQ ID NO: 28250 - DNA, 25 bp, Homo sapiens
gatcatgtacagttccctttttaaa

SEQ ID NO: 28251 - DNA, 25 bp, Homo sapiens
gatgcagtcattgttgctatcagtg

SEQ ID NO: 28252 - DNA, 25 bp, Homo sapiens
gggaggagtggagctatccttccat

SEQ ID NO: 28253 - DNA, 25 bp, Homo sapiens
gtttcttaaacgtatatcctttcat

SEQ ID NO: 28254 - DNA, 25 bp, Homo sapiens
tagactcgggccacttggagttgtg

SEQ ID NO: 28255 - DNA, 25 bp, Homo sapiens
aacctcctcagtatccatatattcc

SEQ ID NO: 28256 - DNA, 25 bp, Homo sapiens
acaactgaattcctgcgcagtggag

SEQ ID NO: 28257 - DNA, 25 bp, Homo sapiens
acaagctggtagctgcaccattgtt

SEQ ID NO: 28258 - DNA, 25 bp, Homo sapiens
agaaggacagctctgttgcagccag

SEQ ID NO: 28259 - DNA, 25 bp, Homo sapiens
caactttcttcaaactacctggtgg

SEQ ID NO: 28260 - DNA, 25 bp, Homo sapiens
gagaccaaattttgaacctcctcag

SEQ ID NO: 28261 - DNA, 25 bp, Homo sapiens
gggtcattgacgattgcattggtaa

SEQ ID NO: 28262 - DNA, 25 bp, Homo sapiens
gggtcgtcaggatggagttttgcaa

SEQ ID NO: 28263 - DNA, 25 bp, Homo sapiens
gttctgattgtacatgagcaccggc

SEQ ID NO: 28264 - DNA, 25 bp, Homo sapiens
gttgcagccagatttcagcgcatga

SEQ ID NO: 28265 - DNA, 25 bp, Homo sapiens
tatggacccatcatttctagtctcc

SEQ ID NO: 28266 - DNA, 25 bp, Homo sapiens
cggttgaaagccttcgaaccgtgca

SEQ ID NO: 28267 - DNA, 25 bp, Homo sapiens
ctctccgagcagcaaccagacggga

SEQ ID NO: 28268 - DNA, 25 bp, Homo sapiens
gaagaagcctggcagacaggcgggc

SEQ ID NO: 28269 - DNA, 25 bp, Homo sapiens
ggattcctagaagagtctgtgttga

SEQ ID NO: 28270 - DNA, 25 bp, Homo sapiens
ggcgggcaaacagtgagcgcccacc

SEQ ID NO: 28271 - DNA, 25 bp, Homo sapiens
gtcccaaagctggctggattcctag

SEQ ID NO: 28272 - DNA, 25 bp, Homo sapiens
taagctgttcatgctgggactgaca

SEQ ID NO: 28273 - DNA, 25 bp, Homo sapiens
tctcggacggatctgctcagaaagg

SEQ ID NO: 28274 - DNA, 25 bp, Homo sapiens
tctggttctcagggcagcattttcc

SEQ ID NO: 28275 - DNA, 25 bp, Homo sapiens
tcttgctaaaaccggcaattctccg

SEQ ID NO: 28276 - DNA, 25 bp, Homo sapiens
ttgttttgcatttcttggagcctct

SEQ ID NO: 28277 - DNA, 25 bp, Homo sapiens
aacatatacttgtgccttattttca

SEQ ID NO: 28278 - DNA, 25 bp, Homo sapiens
acaagcgattgtccatctgttgcct

SEQ ID NO: 28279 - DNA, 25 bp, Homo sapiens
actgatgtaacctcaaagcctctca

SEQ ID NO: 28280 - DNA, 25 bp, Homo sapiens
catttcttgggatcgctcgtttggt

SEQ ID NO: 28281 - DNA, 25 bp, Homo sapiens
ccctgatccttccattatcaagttt

SEQ ID NO: 28282 - DNA, 25 bp, Homo sapiens
cctgctttagccatctgtgggaaac

SEQ ID NO: 28283 - DNA, 25 bp, Homo sapiens
ctcttgtcaaatctgtgtcggctgc

SEQ ID NO: 28284 - DNA, 25 bp, Homo sapiens
gacacctctgcaaaatgtgcctcaa

SEQ ID NO: 28285 - DNA, 25 bp, Homo sapiens
gtgcctcaagtccatttcttgggat

SEQ ID NO: 28286 - DNA, 25 bp, Homo sapiens
gtttggtgcactctcgtgggagaca

SEQ ID NO: 28287 - DNA, 25 bp, Homo sapiens
tcaccattcctcttggcttggaaag

SEQ ID NO: 28288 - DNA, 25 bp, Homo sapiens
agatggtctgtcctttttgtgattt

SEQ ID NO: 28289 - DNA, 25 bp, Homo sapiens
atgatgtcaggaccattctgctctc

SEQ ID NO: 28290 - DNA, 25 bp, Homo sapiens
caatgcgcccacagtgaagttcctc

SEQ ID NO: 28291 - DNA, 25 bp, Homo sapiens
gagctctggaaaaaccccacagctt

SEQ ID NO: 28292 - DNA, 25 bp, Homo sapiens
gccttccctgaatcagacaaccttt

SEQ ID NO: 28293 - DNA, 25 bp, Homo sapiens
ggaaaagtggtctgccctgtatgat

SEQ ID NO: 28294 - DNA, 25 bp, Homo sapiens
gggtaacatatgcctggacatcctg

SEQ ID NO: 28295 - DNA, 25 bp, Homo sapiens
gggtagggaccatccatggagcagc

SEQ ID NO: 28296 - DNA, 25 bp, Homo sapiens
tataagctctcgctagagttcccca

SEQ ID NO: 28297 - DNA, 25 bp, Homo sapiens
tccatccagagccttctaggagaac

SEQ ID NO: 28298 - DNA, 25 bp, Homo sapiens
tgatagtcccttgaacacacatgct

SEQ ID NO: 28299 - DNA, 25 bp, Homo sapiens
ctgtctactgcaactgtgatttccc

SEQ ID NO: 28300 - DNA, 25 bp, Homo sapiens
gaacatttctcttgtgttcctgact

SEQ ID NO: 28301 - DNA, 25 bp, Homo sapiens
gagtgactagagctcactgtctact

SEQ ID NO: 28302 - DNA, 25 bp, Homo sapiens
ggtttgcctcattgtgctatttgcc

SEQ ID NO: 28303 - DNA, 25 bp, Homo sapiens
gtacgtctagattgtgtggtttgcc

SEQ ID NO: 28304 - DNA, 25 bp, Homo sapiens
gtcctctctatcctggatgagctca

SEQ ID NO: 28305 - DNA, 25 bp, Homo sapiens
tccggacgacgtaatcactgacatt

SEQ ID NO: 28306 - DNA, 25 bp, Homo sapiens
tgaaccttctttctgttcagtccta

SEQ ID NO: 28307 - DNA, 25 bp, Homo sapiens
tgagtttctggacagacttccctct

SEQ ID NO: 28308 - DNA, 25 bp, Homo sapiens
tgatgagctttcctttgatccggac

SEQ ID NO: 28309 - DNA, 25 bp, Homo sapiens
ttccctgcaaattatgtcaagcttc

SEQ ID NO: 28310 - DNA, 25 bp, Homo sapiens
agggattaaggctcagacacctctg

SEQ ID NO: 28311 - DNA, 25 bp, Homo sapiens
cccacgtgggattcacaggggcctg

SEQ ID NO: 28312 - DNA, 25 bp, Homo sapiens
ccctactgcctgagcaaacctgagg

SEQ ID NO: 28313 - DNA, 25 bp, Homo sapiens
ctcaggcacggacagggcacatgat

SEQ ID NO: 28314 - DNA, 25 bp, Homo sapiens
gagtagggcccggggaagcagagcc

SEQ ID NO: 28315 - DNA, 25 bp, Homo sapiens
ggcacatgataccaactgctgccca

SEQ ID NO: 28316 - DNA, 25 bp, Homo sapiens
gggcccctctaaaggattcgtggtg

SEQ ID NO: 28317 - DNA, 25 bp, Homo sapiens
ggttccacacttcacgtggactgag

SEQ ID NO: 28318 - DNA, 25 bp, Homo sapiens
gtggactgaggtagaccctgcatga

SEQ ID NO: 28319 - DNA, 25 bp, Homo sapiens
tcagagaccctttggggttccacac

SEQ ID NO: 28320 - DNA, 25 bp, Homo sapiens
ttccctcccctcctagaggagagga

SEQ ID NO: 28321 - DNA, 25 bp, Homo sapiens
aatggatgtaactgtaccttggtac

SEQ ID NO: 28322 - DNA, 25 bp, Homo sapiens
acaattgtgtaatgtgtctccctcc

SEQ ID NO: 28323 - DNA, 25 bp, Homo sapiens
accttggtacagcttttcacttgtt

SEQ ID NO: 28324 - DNA, 25 bp, Homo sapiens
agtagtgcctgtggtttagcccacc

SEQ ID NO: 28325 - DNA, 25 bp, Homo sapiens
gaaatcgctgcaaggtaatcacaat

SEQ ID NO: 28326 - DNA, 25 bp, Homo sapiens
gacaacacaccttgggtagttctgc

SEQ ID NO: 28327 - DNA, 25 bp, Homo sapiens
gtactgagagttgacctctccctgt

SEQ ID NO: 28328 - DNA, 25 bp, Homo sapiens
gtctccctcctacattgtaacaatt

SEQ ID NO: 28329 - DNA, 25 bp, Homo sapiens
gtgctttagttgctagtttgtactg

SEQ ID NO: 28330 - DNA, 25 bp, Homo sapiens
gtttagcccaccaatcttgatgact

SEQ ID NO: 28331 - DNA, 25 bp, Homo sapiens
tgggtagttctgcttgtgtttttgc

SEQ ID NO: 28332 - DNA, 25 bp, Homo sapiens
cacaccccgagggcctgaggagagg

SEQ ID NO: 28333 - DNA, 25 bp, Homo sapiens
cagcttctgtttccggcggaggaag

SEQ ID NO: 28334 - DNA, 25 bp, Homo sapiens
ccagcacggacccaggaaatccagg

SEQ ID NO: 28335 - DNA, 25 bp, Homo sapiens
cttcgctctgtttttataccctgaa

SEQ ID NO: 28336 - DNA, 25 bp, Homo sapiens
gactcagggctccattctggagggc

SEQ ID NO: 28337 - DNA, 25 bp, Homo sapiens
gaggaggaattttgccgcctgagac

SEQ ID NO: 28338 - DNA, 25 bp, Homo sapiens
gccatctcagtattgcctgtggggg

SEQ ID NO: 28339 - DNA, 25 bp, Homo sapiens
ggaggaagacaatggggcggggcct

SEQ ID NO: 28340 - DNA, 25 bp, Homo sapiens
ggcctcctcgagatggggatggggt

SEQ ID NO: 28341 - DNA, 25 bp, Homo sapiens
tctcagtattgcctgtgggggccac

SEQ ID NO: 28342 - DNA, 25 bp, Homo sapiens
tgggggagaggacgtgagggaccac

SEQ ID NO: 28343 - DNA, 25 bp, Homo sapiens
aattggcctcttcctaagtatatta

SEQ ID NO: 28344 - DNA, 25 bp, Homo sapiens
agcggctaggttttattcatactgt

SEQ ID NO: 28345 - DNA, 25 bp, Homo sapiens
atgcctattctggtgttgcgtttgt

SEQ ID NO: 28346 - DNA, 25 bp, Homo sapiens
gacgttatcctctcagattcttatc

SEQ ID NO: 28347 - DNA, 25 bp, Homo sapiens
gcatcccaggcctgtacagatgtat

SEQ ID NO: 28348 - DNA, 25 bp, Homo sapiens
taccaggttttacacttgcatctct

SEQ ID NO: 28349 - DNA, 25 bp, Homo sapiens
tatatcagtgcacaggcgcatccca

SEQ ID NO: 28350 - DNA, 25 bp, Homo sapiens
tatgcctccccctaaattaatgact

SEQ ID NO: 28351 - DNA, 25 bp, Homo sapiens
tgaatttgtgccactttaatccttc

SEQ ID NO: 28352 - DNA, 25 bp, Homo sapiens
ttccactatcattcccattttgtta

SEQ ID NO: 28353 - DNA, 25 bp, Homo sapiens
tttatccttacattttatgcctccc

SEQ ID NO: 28354 - DNA, 25 bp, Homo sapiens
aaaggcttccaggagtttccatgaa

SEQ ID NO: 28355 - DNA, 25 bp, Homo sapiens
accaatcacgcctacagtgctttga

SEQ ID NO: 28356 - DNA, 25 bp, Homo sapiens
agagcttcttagcagttcctggtct

SEQ ID NO: 28357 - DNA, 25 bp, Homo sapiens
caaagtgatacccccacaggtaagc

SEQ ID NO: 28358 - DNA, 25 bp, Homo sapiens
cagttccttcaaagtgataccccca

SEQ ID NO: 28359 - DNA, 25 bp, Homo sapiens
ctcatcttccaccctaaaactagag

SEQ ID NO: 28360 - DNA, 25 bp, Homo sapiens
gcatcctgaatacatcatccgcagc

SEQ ID NO: 28361 - DNA, 25 bp, Homo sapiens
gctagtttcaaacaggccctaaaca

SEQ ID NO: 28362 - DNA, 25 bp, Homo sapiens
ggccctaaacaagtctgctgctgcc

SEQ ID NO: 28363 - DNA, 25 bp, Homo sapiens
gtctcttgaggtcccttgaatcttc

SEQ ID NO: 28364 - DNA, 25 bp, Homo sapiens
gtgatcttcctaaaacttcacttaa

SEQ ID NO: 28365 - DNA, 25 bp, Homo sapiens
agaacttttttccatatgcgtgcat

SEQ ID NO: 28366 - DNA, 25 bp, Homo sapiens
gaacttgggttgagggcactaccag

SEQ ID NO: 28367 - DNA, 25 bp, Homo sapiens
ggaatgatgttttgcaccttattga

SEQ ID NO: 28368 - DNA, 25 bp, Homo sapiens
ggcactaccagactgacatggccag

SEQ ID NO: 28369 - DNA, 25 bp, Homo sapiens
gggaaaacagacaccagaacttggg

SEQ ID NO: 28370 - DNA, 25 bp, Homo sapiens
gtaggatacactcgagtctgtttat

SEQ ID NO: 28371 - DNA, 25 bp, Homo sapiens
gtttattgtttcagtatactcgtac

SEQ ID NO: 28372 - DNA, 25 bp, Homo sapiens
tatcagatcattacccaccatatgc

SEQ ID NO: 28373 - DNA, 25 bp, Homo sapiens
tattgtacttgcactagctttttta

SEQ ID NO: 28374 - DNA, 25 bp, Homo sapiens
tattttctaatcgtggtgtgtctat

SEQ ID NO: 28375 - DNA, 25 bp, Homo sapiens
tgcgtgcatactctctgtaattcca

SEQ ID NO: 28376 - DNA, 25 bp, Homo sapiens
aattccggaagctctttccaggatg

SEQ ID NO: 28377 - DNA, 25 bp, Homo sapiens
gaactgctttccctcggaatgtttc

SEQ ID NO: 28378 - DNA, 25 bp, Homo sapiens
gaccgtgcaggccggtgacacggcc

SEQ ID NO: 28379 - DNA, 25 bp, Homo sapiens
gatcctcactctccgtgtgaggctc

SEQ ID NO: 28380 - DNA, 25 bp, Homo sapiens
gatgcggcggttttgaaggcgacgg

SEQ ID NO: 28381 - DNA, 25 bp, Homo sapiens
gcaactcagcctacggcaaattccg

SEQ ID NO: 28382 - DNA, 25 bp, Homo sapiens
gcagcttggtgtcaggtgcagcagg

SEQ ID NO: 28383 - DNA, 25 bp, Homo sapiens
gcatccacacaattccagtgggccc

SEQ ID NO: 28384 - DNA, 25 bp, Homo sapiens
gccatttgctgggatgaccgtgcag

SEQ ID NO: 28385 - DNA, 25 bp, Homo sapiens
gcctggggagctgaggcgttaccgc

SEQ ID NO: 28386 - DNA, 25 bp, Homo sapiens
ggccgacgtgagggtcatcatcagc

SEQ ID NO: 28387 - DNA, 25 bp, Homo sapiens
acaaaaacccttcccatgcaaattg

SEQ ID NO: 28388 - DNA, 25 bp, Homo sapiens
acatactcctgccagcttgggggag

SEQ ID NO: 28389 - DNA, 25 bp, Homo sapiens
agaaccagatgcccatgctcatggg

SEQ ID NO: 28390 - DNA, 25 bp, Homo sapiens
caaccaggccttaggtgctacagct

SEQ ID NO: 28391 - DNA, 25 bp, Homo sapiens
cagtatttattatcctgcaccacct

SEQ ID NO: 28392 - DNA, 25 bp, Homo sapiens
gctggccaagtgctctgagatcacc

SEQ ID NO: 28393 - DNA, 25 bp, Homo sapiens
ggcttcttgagctaagggggacacc

SEQ ID NO: 28394 - DNA, 25 bp, Homo sapiens
tcaagaatgctggacgtcggctggc

SEQ ID NO: 28395 - DNA, 25 bp, Homo sapiens
tcaccgaccctgatatcctgaaaac

SEQ ID NO: 28396 - DNA, 25 bp, Homo sapiens
tgctacagctaaagtcatcaccgac

SEQ ID NO: 28397 - DNA, 25 bp, Homo sapiens
tggatgcagacgccctgtacaatca

SEQ ID NO: 28398 - DNA, 25 bp, Homo sapiens
agagccacagaattgctttccttcc

SEQ ID NO: 28399 - DNA, 25 bp, Homo sapiens
caaggagccagggctactggcctcc

SEQ ID NO: 28400 - DNA, 25 bp, Homo sapiens
cccgcctttgacatgaggccttcag

SEQ ID NO: 28401 - DNA, 25 bp, Homo sapiens
ccttgaccttcatttaacttggctc

SEQ ID NO: 28402 - DNA, 25 bp, Homo sapiens
ctcacttctcttcagacttgggtag

SEQ ID NO: 28403 - DNA, 25 bp, Homo sapiens
gaccaggaggagcatccttgacctt

SEQ ID NO: 28404 - DNA, 25 bp, Homo sapiens
gcgtgtttcaggaggatcccaactc

SEQ ID NO: 28405 - DNA, 25 bp, Homo sapiens
ggcgtcagtatctaccaggcaatga

SEQ ID NO: 28406 - DNA, 25 bp, Homo sapiens
ggcttccactcaaggaccatttatg

SEQ ID NO: 28407 - DNA, 25 bp, Homo sapiens
gggatgacgcgatccgcgtgtttca

SEQ ID NO: 28408 - DNA, 25 bp, Homo sapiens
tcagcggcctgaaggcctctgagct

SEQ ID NO: 28409 - DNA, 25 bp, Homo sapiens
aaagtcgcttggtggcgttggacct

SEQ ID NO: 28410 - DNA, 25 bp, Homo sapiens
actaccagttcaccatcctggacgt

SEQ ID NO: 28411 - DNA, 25 bp, Homo sapiens
agagtcatccattccgagagcagat

SEQ ID NO: 28412 - DNA, 25 bp, Homo sapiens
agtgggtttacccttctgagcagat

SEQ ID NO: 28413 - DNA, 25 bp, Homo sapiens
ccaagggcacgaattcgttcctgga

SEQ ID NO: 28414 - DNA, 25 bp, Homo sapiens
gaagcccttcatgctgcagagtgtc

SEQ ID NO: 28415 - DNA, 25 bp, Homo sapiens
gattggatcataaaccgttgcggga

SEQ ID NO: 28416 - DNA, 25 bp, Homo sapiens
ggacctcgtaaagcactgtttcaga

SEQ ID NO: 28417 - DNA, 25 bp, Homo sapiens
ggtccatcattgatccggtttggag

SEQ ID NO: 28418 - DNA, 25 bp, Homo sapiens
gtcctgccttagattcactttcggc

SEQ ID NO: 28419 - DNA, 25 bp, Homo sapiens
gttcctggatggggtatgagttgcc

SEQ ID NO: 28420 - DNA, 25 bp, Homo sapiens
attcgtgtgaatcagactaagtggg

SEQ ID NO: 28421 - DNA, 25 bp, Homo sapiens
atttttacaactctgctctacttag

SEQ ID NO: 28422 - DNA, 25 bp, Homo sapiens
ctctgctctacttagcctttggatt

SEQ ID NO: 28423 - DNA, 25 bp, Homo sapiens
gaatacaagcattccatgtacacat

SEQ ID NO: 28424 - DNA, 25 bp, Homo sapiens
gactaagtgggatttcatttttaca

SEQ ID NO: 28425 - DNA, 25 bp, Homo sapiens
ggatttcatttttacaactctgctc

SEQ ID NO: 28426 - DNA, 25 bp, Homo sapiens
gtacacatgttaattagcagttagt

SEQ ID NO: 28427 - DNA, 25 bp, Homo sapiens
tgctctacttagcctttggatttag

SEQ ID NO: 28428 - DNA, 25 bp, Homo sapiens
tgggccaacactttctcataaaaat

SEQ ID NO: 28429 - DNA, 25 bp, Homo sapiens
ttacaactctgctctacttagcctt

SEQ ID NO: 28430 - DNA, 25 bp, Homo sapiens
ttcatttttacaactctgctctact

SEQ ID NO: 28431 - DNA, 25 bp, Homo sapiens
aactaggaccgacagtgacttcacc

SEQ ID NO: 28432 - DNA, 25 bp, Homo sapiens
aagatccctatttgactgtaaaagt

SEQ ID NO: 28433 - DNA, 25 bp, Homo sapiens
acctgtttcttctacaagatcccta

SEQ ID NO: 28434 - DNA, 25 bp, Homo sapiens
cctgcagcccaacaaacaagggaac

SEQ ID NO: 28435 - DNA, 25 bp, Homo sapiens
gaactaaggcaaccaggaaggcact

SEQ ID NO: 28436 - DNA, 25 bp, Homo sapiens
gacttcaccagcttgctaggtcaga

SEQ ID NO: 28437 - DNA, 25 bp, Homo sapiens
gcactgatctgccttataagcacag

SEQ ID NO: 28438 - DNA, 25 bp, Homo sapiens
gctaatactcacatgttctccaatc

SEQ ID NO: 28439 - DNA, 25 bp, Homo sapiens
gtcatctgaaagtcaggcctgctgc

SEQ ID NO: 28440 - DNA, 25 bp, Homo sapiens
tctccaatcccaggtagccatggta

SEQ ID NO: 28441 - DNA, 25 bp, Homo sapiens
ttgggctgtgttggaatgggcctgc

SEQ ID NO: 28442 - DNA, 25 bp, Homo sapiens
aagacatcatattcccgtaacatta

SEQ ID NO: 28443 - DNA, 25 bp, Homo sapiens
agccctttaggaagcagtacctctc

SEQ ID NO: 28444 - DNA, 25 bp, Homo sapiens
agggctcatcatttttcatactacc

SEQ ID NO: 28445 - DNA, 25 bp, Homo sapiens
atttggatagtctctagggctcatc

SEQ ID NO: 28446 - DNA, 25 bp, Homo sapiens
cagtacctctcgcctggaggatctg

SEQ ID NO: 28447 - DNA, 25 bp, Homo sapiens
ctcagtctgatcgtctttaccagta

SEQ ID NO: 28448 - DNA, 25 bp, Homo sapiens
ctcttctggcctgtgtctaaggaat

SEQ ID NO: 28449 - DNA, 25 bp, Homo sapiens
ggtattgatgacttcagcctggaaa

SEQ ID NO: 28450 - DNA, 25 bp, Homo sapiens
tctttccatttctctatcaagcatt

SEQ ID NO: 28451 - DNA, 25 bp, Homo sapiens
tgctccacctttcagtgacatttaa

SEQ ID NO: 28452 - DNA, 25 bp, Homo sapiens
tggaggatctgtgccatcttggatt

SEQ ID NO: 28453 - DNA, 25 bp, Homo sapiens
aattgacaactaacttcttgctgct

SEQ ID NO: 28454 - DNA, 25 bp, Homo sapiens
actagcactgtctcctaaacttgta

SEQ ID NO: 28455 - DNA, 25 bp, Homo sapiens
aggatttccatgtagctgtggtgct

SEQ ID NO: 28456 - DNA, 25 bp, Homo sapiens
agtttaggagagcactttaccaagc

SEQ ID NO: 28457 - DNA, 25 bp, Homo sapiens
atgctaagtgtatttgtgttcccca

SEQ ID NO: 28458 - DNA, 25 bp, Homo sapiens
caagctggtgtcctccaaactgaaa

SEQ ID NO: 28459 - DNA, 25 bp, Homo sapiens
ctgctgcatgactatcatctttgag

SEQ ID NO: 28460 - DNA, 25 bp, Homo sapiens
tgagccatggattctgagttttgtt

SEQ ID NO: 28461 - DNA, 25 bp, Homo sapiens
tgtggtgctagttattactggctac

SEQ ID NO: 28462 - DNA, 25 bp, Homo sapiens
ttatagttatcctactgagccatgg

SEQ ID NO: 28463 - DNA, 25 bp, Homo sapiens
ttccccaagtgtacaagccttctat

SEQ ID NO: 28464 - DNA, 25 bp, Homo sapiens
accctcatccagtccatactgatat

SEQ ID NO: 28465 - DNA, 25 bp, Homo sapiens
caccactgcaggataaccgaactca

SEQ ID NO: 28466 - DNA, 25 bp, Homo sapiens
cagaccggcagtcatcatggcagtt

SEQ ID NO: 28467 - DNA, 25 bp, Homo sapiens
cctcttcctcgacaatcacaaatta

SEQ ID NO: 28468 - DNA, 25 bp, Homo sapiens
ctcaatccttttttaatcatccctc

SEQ ID NO: 28469 - DNA, 25 bp, Homo sapiens
gactgactgaactcgtactttggga

SEQ ID NO: 28470 - DNA, 25 bp, Homo sapiens
gcagtattactatcacaccaacagc

SEQ ID NO: 28471 - DNA, 25 bp, Homo sapiens
gtgcacttactgtatatcttttcat

SEQ ID NO: 28472 - DNA, 25 bp, Homo sapiens
gttgcctgcatagtcatatcgagtg

SEQ ID NO: 28473 - DNA, 25 bp, Homo sapiens
tacatgcaagctgtagccagccctt

SEQ ID NO: 28474 - DNA, 25 bp, Homo sapiens
tatatataactgaccacgctcaccc

SEQ ID NO: 28475 - DNA, 25 bp, Homo sapiens
aaacctgcactgaaacctgagatgg

SEQ ID NO: 28476 - DNA, 25 bp, Homo sapiens
cccagaggtggcccttgtttacagt

SEQ ID NO: 28477 - DNA, 25 bp, Homo sapiens
ctatccatgtaataagcacttgcct

SEQ ID NO: 28478 - DNA, 25 bp, Homo sapiens
ctctcatgcgtgttttaccttttga

SEQ ID NO: 28479 - DNA, 25 bp, Homo sapiens
gatgttcagagtggctcactggctg

SEQ ID NO: 28480 - DNA, 25 bp, Homo sapiens
gctgttcatgctccaagactttagt

SEQ ID NO: 28481 - DNA, 25 bp, Homo sapiens
gtattctagtggctgttcatgctcc

SEQ ID NO: 28482 - DNA, 25 bp, Homo sapiens
gttaccgagacatgaatactatcca

SEQ ID NO: 28483 - DNA, 25 bp, Homo sapiens
taaactgtagcgaccccagactgta

SEQ ID NO: 28484 - DNA, 25 bp, Homo sapiens
tgcctggagggtaactggggccacc

SEQ ID NO: 28485 - DNA, 25 bp, Homo sapiens
ttctccagaaaagctgcttctcccc

SEQ ID NO: 28486 - DNA, 25 bp, Homo sapiens
aagacacctcccgagtgtgtctgct

SEQ ID NO: 28487 - DNA, 25 bp, Homo sapiens
agctctaccctcagcggatgataat

SEQ ID NO: 28488 - DNA, 25 bp, Homo sapiens
cagatgcaaaatcaccccttctgca

SEQ ID NO: 28489 - DNA, 25 bp, Homo sapiens
catcgtcattcttcaggattgccct

SEQ ID NO: 28490 - DNA, 25 bp, Homo sapiens
ccttccaccctcagcggatgataat

SEQ ID NO: 28491 - DNA, 25 bp, Homo sapiens
gaatggcggcagtggagcatcgtca

SEQ ID NO: 28492 - DNA, 25 bp, Homo sapiens
gacacctgcggagtgtctgctctat

SEQ ID NO: 28493 - DNA, 25 bp, Homo sapiens
gcctctttgcaaccgggtcagaatg

SEQ ID NO: 28494 - DNA, 25 bp, Homo sapiens
gctccaccctcagcggatgataatc

SEQ ID NO: 28495 - DNA, 25 bp, Homo sapiens
tgataactccctgagcctcaagaca

SEQ ID NO: 28496 - DNA, 25 bp, Homo sapiens
tgataatctcaagacacctcccgag

SEQ ID NO: 28497 - DNA, 25 bp, Homo sapiens
aagagtgggaacgccagtacagccg

SEQ ID NO: 28498 - DNA, 25 bp, Homo sapiens
aagcccccattaccgacattaggca

SEQ ID NO: 28499 - DNA, 25 bp, Homo sapiens
aaggggctcaagctgtgatgctgct

SEQ ID NO: 28500 - DNA, 25 bp, Homo sapiens
aatacagctcttctcgaaggcgctc

SEQ ID NO: 28501 - DNA, 25 bp, Homo sapiens
acccaagctgacgcctcaggagaag

SEQ ID NO: 28502 - DNA, 25 bp, Homo sapiens
cgccatcacccgcaagagagaagct

SEQ ID NO: 28503 - DNA, 25 bp, Homo sapiens
ctccccccgatacagtcgagaatac

SEQ ID NO: 28504 - DNA, 25 bp, Homo sapiens
ctgaaaaagaccgaacctgccgctg

SEQ ID NO: 28505 - DNA, 25 bp, Homo sapiens
gatccagcaggagcatgagcggcag

SEQ ID NO: 28506 - DNA, 25 bp, Homo sapiens
gatgctgctggttttatctctagtg

SEQ ID NO: 28507 - DNA, 25 bp, Homo sapiens
gcgggaagacgagcttcgagccatg

SEQ ID NO: 28508 - DNA, 25 bp, Homo sapiens
aacatgctgtgtaagctgtgtccta

SEQ ID NO: 28509 - DNA, 25 bp, Homo sapiens
aatagagatgagctttctttttaaa

SEQ ID NO: 28510 - DNA, 25 bp, Homo sapiens
aatcagctgctttgttaccttaaaa

SEQ ID NO: 28511 - DNA, 25 bp, Homo sapiens
acactcagctgttcagattggacat

SEQ ID NO: 28512 - DNA, 25 bp, Homo sapiens
gattggacataactgacttagttct

SEQ ID NO: 28513 - DNA, 25 bp, Homo sapiens
ggtgatgtcctgtaaacactcagct

SEQ ID NO: 28514 - DNA, 25 bp, Homo sapiens
gtaagctgtgtcctagttcttgaac

SEQ ID NO: 28515 - DNA, 25 bp, Homo sapiens
gttcttgaacagtttatgcagtgct

SEQ ID NO: 28516 - DNA, 25 bp, Homo sapiens
gttgtagatacaatcagctgctttg

SEQ ID NO: 28517 - DNA, 25 bp, Homo sapiens
tagtttagtgtggttttctgtttct

SEQ ID NO: 28518 - DNA, 25 bp, Homo sapiens
ttctaatttgctgctgataatgtat

SEQ ID NO: 28519 - DNA, 25 bp, Homo sapiens
aacaaacttcagaccttgtctccct

SEQ ID NO: 28520 - DNA, 25 bp, Homo sapiens
aagtgtcttcaagtagcagctcttt

SEQ ID NO: 28521 - DNA, 25 bp, Homo sapiens
agatggggactgtgcatcttccctt

SEQ ID NO: 28522 - DNA, 25 bp, Homo sapiens
ataaagggatagcagcccctcatgc

SEQ ID NO: 28523 - DNA, 25 bp, Homo sapiens
gaaattccacaccacctagtttggc

SEQ ID NO: 28524 - DNA, 25 bp, Homo sapiens
gagagctacatagccaggccagatg

SEQ ID NO: 28525 - DNA, 25 bp, Homo sapiens
gcaaaactgttgtaggtgttccttc

SEQ ID NO: 28526 - DNA, 25 bp, Homo sapiens
gcaggagctaatgtcaaaccccgaa

SEQ ID NO: 28527 - DNA, 25 bp, Homo sapiens
gccccaggtgtgcttacaaacaaaa

SEQ ID NO: 28528 - DNA, 25 bp, Homo sapiens
gcttggacagctagagcacatcctc

SEQ ID NO: 28529 - DNA, 25 bp, Homo sapiens
ggacattcacctggaaacttaccaa

SEQ ID NO: 28530 - DNA, 25 bp, Homo sapiens
aatcaagctcttgaagcacaggttt

SEQ ID NO: 28531 - DNA, 25 bp, Homo sapiens
agaggcctgtggcccaaagaacctg

SEQ ID NO: 28532 - DNA, 25 bp, Homo sapiens
cacaggtttagccccaacatgactg

SEQ ID NO: 28533 - DNA, 25 bp, Homo sapiens
ccccaacatgactgagcgcgaggct

SEQ ID NO: 28534 - DNA, 25 bp, Homo sapiens
ccttggtaacgccatggactgcagc

SEQ ID NO: 28535 - DNA, 25 bp, Homo sapiens
ctggtcactctcatgttggacacgg

SEQ ID NO: 28536 - DNA, 25 bp, Homo sapiens
ctgttttcgcggccagacaatcaag

SEQ ID NO: 28537 - DNA, 25 bp, Homo sapiens
gcagccttggtaacgccatggactg

SEQ ID NO: 28538 - DNA, 25 bp, Homo sapiens
gtggcgcagccttggtaacgccatg

SEQ ID NO: 28539 - DNA, 25 bp, Homo sapiens
ttgaagcacaggtttagccccaaca

SEQ ID NO: 28540 - DNA, 25 bp, Homo sapiens
ttttcgcggccagacaatcaagctc

SEQ ID NO: 28541 - DNA, 25 bp, Homo sapiens
aaaccagttgtgatgctaccaatat

SEQ ID NO: 28542 - DNA, 25 bp, Homo sapiens
aatactccaccaattcatttgcttt

SEQ ID NO: 28543 - DNA, 25 bp, Homo sapiens
actctgagactgactatcacccaat

SEQ ID NO: 28544 - DNA, 25 bp, Homo sapiens
agagaatttgcattggctttagcca

SEQ ID NO: 28545 - DNA, 25 bp, Homo sapiens
atggaacggttctgtccatgggtcc

SEQ ID NO: 28546 - DNA, 25 bp, Homo sapiens
cttcatcccaactgggcatcacata

SEQ ID NO: 28547 - DNA, 25 bp, Homo sapiens
gacataccaggttacaccggatgac

SEQ ID NO: 28548 - DNA, 25 bp, Homo sapiens
ggtactggtagttaactctcaagga

SEQ ID NO: 28549 - DNA, 25 bp, Homo sapiens
gtatcgcgtctaccacaatcaatac

SEQ ID NO: 28550 - DNA, 25 bp, Homo sapiens
gtccatgggtccaaagttcttacca

SEQ ID NO: 28551 - DNA, 25 bp, Homo sapiens
gttcttaccatatctactctgagac

SEQ ID NO: 28552 - DNA, 25 bp, Homo sapiens
aggtccctcccacaacaatgggaat

SEQ ID NO: 28553 - DNA, 25 bp, Homo sapiens
cacacctgtagtctcagctactcgg

SEQ ID NO: 28554 - DNA, 25 bp, Homo sapiens
cagatgttaattcctgtgactgact

SEQ ID NO: 28555 - DNA, 25 bp, Homo sapiens
gaaacctcatccctacagaaaatac

SEQ ID NO: 28556 - DNA, 25 bp, Homo sapiens
gaaaggtaacctaaggctgggcacg

SEQ ID NO: 28557 - DNA, 25 bp, Homo sapiens
gacacggccaaactgtatcacattg

SEQ ID NO: 28558 - DNA, 25 bp, Homo sapiens
gagctcaggaggtcgaggcttcagt

SEQ ID NO: 28559 - DNA, 25 bp, Homo sapiens
gcctatagtcctggcactttgagtg

SEQ ID NO: 28560 - DNA, 25 bp, Homo sapiens
gggcacggtggctcgtgcctatagt

SEQ ID NO: 28561 - DNA, 25 bp, Homo sapiens
ggtgggtggattgcttgaaaccagg

SEQ ID NO: 28562 - DNA, 25 bp, Homo sapiens
tgggtggagacacggccaaactgta

SEQ ID NO: 28563 - DNA, 25 bp, Homo sapiens
caccacgacgactactacagcaggc

SEQ ID NO: 28564 - DNA, 25 bp, Homo sapiens
catctacttgtctccagatcggact

SEQ ID NO: 28565 - DNA, 25 bp, Homo sapiens
ctctaggtcccgaagtcgtggcagg

SEQ ID NO: 28566 - DNA, 25 bp, Homo sapiens
ctggctcctcctttgggaagaactc

SEQ ID NO: 28567 - DNA, 25 bp, Homo sapiens
gaaatagggaccgcagcagggaccg

SEQ ID NO: 28568 - DNA, 25 bp, Homo sapiens
gaagaaatctcacaaacgcacatca

SEQ ID NO: 28569 - DNA, 25 bp, Homo sapiens
gaaggagaaaccctagtccagacca

SEQ ID NO: 28570 - DNA, 25 bp, Homo sapiens
gcactgcaactttcttcatgtgttc

SEQ ID NO: 28571 - DNA, 25 bp, Homo sapiens
gtccagaccactcctacaaaagaaa

SEQ ID NO: 28572 - DNA, 25 bp, Homo sapiens
tgcagtgtgaattctgccccgtgac

SEQ ID NO: 28573 - DNA, 25 bp, Homo sapiens
tgccccgtgacccggtggaaaatgg

SEQ ID NO: 28574 - DNA, 25 bp, Homo sapiens
aagaatgaaagactccgtgctgcct

SEQ ID NO: 28575 - DNA, 25 bp, Homo sapiens
cacggggccatgtacaacgggatcg

SEQ ID NO: 28576 - DNA, 25 bp, Homo sapiens
gaagctaaacaaccagctcctgagc

SEQ ID NO: 28577 - DNA, 25 bp, Homo sapiens
gacctttcgactcatgttgctggag

SEQ ID NO: 28578 - DNA, 25 bp, Homo sapiens
gattcttacgtagatggcagctctt

SEQ ID NO: 28579 - DNA, 25 bp, Homo sapiens
gtcacggagactcaccagttggcag

SEQ ID NO: 28580 - DNA, 25 bp, Homo sapiens
gtgagcggcctgactacaagggaga

SEQ ID NO: 28581 - DNA, 25 bp, Homo sapiens
tcagcgtcgtgcccgagaagctaaa

SEQ ID NO: 28582 - DNA, 25 bp, Homo sapiens
tccgtgctgcctttggcatcagtga

SEQ ID NO: 28583 - DNA, 25 bp, Homo sapiens
tcgagctgcgatgcctcgagctgga

SEQ ID NO: 28584 - DNA, 25 bp, Homo sapiens
tggtgaagcggcctaatcctgacat

SEQ ID NO: 28585 - DNA, 25 bp, Homo sapiens
aagggcacctgtgctggttgcactt

SEQ ID NO: 28586 - DNA, 25 bp, Homo sapiens
accaatgggcattgctgtgttcagt

SEQ ID NO: 28587 - DNA, 25 bp, Homo sapiens
ataccgacctaagatgcgattacgc

SEQ ID NO: 28588 - DNA, 25 bp, Homo sapiens
ctccaccccctaatcagatagtaga

SEQ ID NO: 28589 - DNA, 25 bp, Homo sapiens
gaactcttggtacctggaaatgtga

SEQ ID NO: 28590 - DNA, 25 bp, Homo sapiens
gaatctggaatattacctgtgtcat

SEQ ID NO: 28591 - DNA, 25 bp, Homo sapiens
gatggattcagtactcctcaaccac

SEQ ID NO: 28592 - DNA, 25 bp, Homo sapiens
gccaggttgctgtgttgcagtgcat

SEQ ID NO: 28593 - DNA, 25 bp, Homo sapiens
gctgacttgattgtgccatttagag

SEQ ID NO: 28594 - DNA, 25 bp, Homo sapiens
ggttgcacttgctttgattgaatgt

SEQ ID NO: 28595 - DNA, 25 bp, Homo sapiens
tgcgattacgcttcagagataccaa

SEQ ID NO: 28596 - DNA, 25 bp, Homo sapiens
aagacaaacacgtgctcgtccttta

SEQ ID NO: 28597 - DNA, 25 bp, Homo sapiens
accagtaactcttgtgttcaccagg

SEQ ID NO: 28598 - DNA, 25 bp, Homo sapiens
agcacacttgttaaccagtcctgtt

SEQ ID NO: 28599 - DNA, 25 bp, Homo sapiens
agctccgaccatgttgctgtgtgat

SEQ ID NO: 28600 - DNA, 25 bp, Homo sapiens
atgaaaaggggctgtctggggctcc

SEQ ID NO: 28601 - DNA, 25 bp, Homo sapiens
gggataggctcgttggtgacattgt

SEQ ID NO: 28602 - DNA, 25 bp, Homo sapiens
taaactgatttgttgctccctatcc

SEQ ID NO: 28603 - DNA, 25 bp, Homo sapiens
taaatggtcgatcaacttcccacaa

SEQ ID NO: 28604 - DNA, 25 bp, Homo sapiens
taatggagttcaccagcacacttgt

SEQ ID NO: 28605 - DNA, 25 bp, Homo sapiens
tgaattccacgagcctgttctgaaa

SEQ ID NO: 28606 - DNA, 25 bp, Homo sapiens
tttgctttcgtctttttttgtgcgt

SEQ ID NO: 28607 - DNA, 25 bp, Homo sapiens
agacaaggcccataggtatggcccc

SEQ ID NO: 28608 - DNA, 25 bp, Homo sapiens
aggtgtgtgctgctatgaacatctc

SEQ ID NO: 28609 - DNA, 25 bp, Homo sapiens
cagctggtgtcggcatcatactaaa

SEQ ID NO: 28610 - DNA, 25 bp, Homo sapiens
ccagaaccgaagaagagccgcaggt

SEQ ID NO: 28611 - DNA, 25 bp, Homo sapiens
cctacccacatgcactcgtgtgaga

SEQ ID NO: 28612 - DNA, 25 bp, Homo sapiens
ctgcacttacacagaaaggcctaaa

SEQ ID NO: 28613 - DNA, 25 bp, Homo sapiens
gaagagccgcaggtgtgtgctgcta

SEQ ID NO: 28614 - DNA, 25 bp, Homo sapiens
gaagcaatattggctgccctggagc

SEQ ID NO: 28615 - DNA, 25 bp, Homo sapiens
gcactcgtgtgagacaaggcccata

SEQ ID NO: 28616 - DNA, 25 bp, Homo sapiens
gtgtcggcatcatactaaaagcaat

SEQ ID NO: 28617 - DNA, 25 bp, Homo sapiens
taatgacaaatgccctgcacctacc

SEQ ID NO: 28618 - DNA, 25 bp, Homo sapiens
aacccaccattcactggtgctgact

SEQ ID NO: 28619 - DNA, 25 bp, Homo sapiens
ccccagctgtccactgaaacgtgaa

SEQ ID NO: 28620 - DNA, 25 bp, Homo sapiens
gacaccttatcctgatgtatggttc

SEQ ID NO: 28621 - DNA, 25 bp, Homo sapiens
gggagtattgactggtcccttacct

SEQ ID NO: 28622 - DNA, 25 bp, Homo sapiens
gggcctaaccagccttgggagtatt

SEQ ID NO: 28623 - DNA, 25 bp, Homo sapiens
ggtgtgcccagaaagcttgtctgta

SEQ ID NO: 28624 - DNA, 25 bp, Homo sapiens
gtcccttacctcttatggctaagtc

SEQ ID NO: 28625 - DNA, 25 bp, Homo sapiens
gtcctgttttgaatgccaaacccac

SEQ ID NO: 28626 - DNA, 25 bp, Homo sapiens
gtgttcatttaccaagttgacccag

SEQ ID NO: 28627 - DNA, 25 bp, Homo sapiens
tctgaatgcggccacggatgccttg

SEQ ID NO: 28628 - DNA, 25 bp, Homo sapiens
tgaacactttccactttttgacacc

SEQ ID NO: 28629 - DNA, 25 bp, Homo sapiens
aacagatttgccggcattcactgaa

SEQ ID NO: 28630 - DNA, 25 bp, Homo sapiens
aatgcggctaattaacagtcgtatg

SEQ ID NO: 28631 - DNA, 25 bp, Homo sapiens
agcgttatttgccaagttttcttag

SEQ ID NO: 28632 - DNA, 25 bp, Homo sapiens
atttttagcacttggcagcctcatg

SEQ ID NO: 28633 - DNA, 25 bp, Homo sapiens
cagtcgtatgatttctagcccatgg

SEQ ID NO: 28634 - DNA, 25 bp, Homo sapiens
gcagatattgggtccttgtaacttc

SEQ ID NO: 28635 - DNA, 25 bp, Homo sapiens
gcagcctcatgatccttttataaat

SEQ ID NO: 28636 - DNA, 25 bp, Homo sapiens
gccaattacaggccaaagcgttatt

SEQ ID NO: 28637 - DNA, 25 bp, Homo sapiens
gtaacttcaactgactcttccaaat

SEQ ID NO: 28638 - DNA, 25 bp, Homo sapiens
gtggcattattgactgctgatgtga

SEQ ID NO: 28639 - DNA, 25 bp, Homo sapiens
tagaccatctccatttttagcactt

SEQ ID NO: 28640 - DNA, 25 bp, Homo sapiens
aaagagactgcagatgccatcacta

SEQ ID NO: 28641 - DNA, 25 bp, Homo sapiens
agaaagctaccgtgaatttactggg

SEQ ID NO: 28642 - DNA, 25 bp, Homo sapiens
agatgatacccagtggctgacctac

SEQ ID NO: 28643 - DNA, 25 bp, Homo sapiens
cccagcctacatctcaattaaagct

SEQ ID NO: 28644 - DNA, 25 bp, Homo sapiens
cttctctgatatcttcctgtcatgg

SEQ ID NO: 28645 - DNA, 25 bp, Homo sapiens
gataggatttggctacccagcctac

SEQ ID NO: 28646 - DNA, 25 bp, Homo sapiens
gccccgagcccttctaatggggctg

SEQ ID NO: 28647 - DNA, 25 bp, Homo sapiens
gccttgtacctggtgttcggttatg

SEQ ID NO: 28648 - DNA, 25 bp, Homo sapiens
tctgtaccttcctactggagcttga

SEQ ID NO: 28649 - DNA, 25 bp, Homo sapiens
tcttggtgtcatcggactggtggcc

SEQ ID NO: 28650 - DNA, 25 bp, Homo sapiens
tgaactgctctacaagcgcatcatc

SEQ ID NO: 28651 - DNA, 25 bp, Homo sapiens
acaagccaactagtaacaatgcagc

SEQ ID NO: 28652 - DNA, 25 bp, Homo sapiens
acatctgtgatctttctacagcagc

SEQ ID NO: 28653 - DNA, 25 bp, Homo sapiens
agttttgtgccaacattccatgtat

SEQ ID NO: 28654 - DNA, 25 bp, Homo sapiens
atccacactgatttgtacgtctgac

SEQ ID NO: 28655 - DNA, 25 bp, Homo sapiens
cctccccatttcattggcgtaacgt

SEQ ID NO: 28656 - DNA, 25 bp, Homo sapiens
ctacagcagcttcagttttgtgcca

SEQ ID NO: 28657 - DNA, 25 bp, Homo sapiens
gaaagatggtcgtctccagcagaga

SEQ ID NO: 28658 - DNA, 25 bp, Homo sapiens
gtagctttgtacgccttaatgttca

SEQ ID NO: 28659 - DNA, 25 bp, Homo sapiens
gtttgagtaacccacagaacatctg

SEQ ID NO: 28660 - DNA, 25 bp, Homo sapiens
tcagaccaggaggcattgctgtgaa

SEQ ID NO: 28661 - DNA, 25 bp, Homo sapiens
tgcagcaacacttctggtttagcta

SEQ ID NO: 28662 - DNA, 25 bp, Homo sapiens
agatccctcctatacctgaaaatag

SEQ ID NO: 28663 - DNA, 25 bp, Homo sapiens
agcctgcttcataccagagacgact

SEQ ID NO: 28664 - DNA, 25 bp, Homo sapiens
cagtctactgtccgtccagaagaga

SEQ ID NO: 28665 - DNA, 25 bp, Homo sapiens
ccaaggcgttatcgaactccttcca

SEQ ID NO: 28666 - DNA, 25 bp, Homo sapiens
ccagaagagatccctcctatacctg

SEQ ID NO: 28667 - DNA, 25 bp, Homo sapiens
gaaaaagtcctcctaaagctgatga

SEQ ID NO: 28668 - DNA, 25 bp, Homo sapiens
gagactcctccacattggaggcaag

SEQ ID NO: 28669 - DNA, 25 bp, Homo sapiens
gagagtgtaatccacctaactccca

SEQ ID NO: 28670 - DNA, 25 bp, Homo sapiens
gagtgcatctagtgagagtgaagct

SEQ ID NO: 28671 - DNA, 25 bp, Homo sapiens
gatcaagggatcgtttcagacgtag

SEQ ID NO: 28672 - DNA, 25 bp, Homo sapiens
tcagacgtagtgagactcctccaca

SEQ ID NO: 28673 - DNA, 25 bp, Homo sapiens
aagctgccacagaagaggcatcttc

SEQ ID NO: 28674 - DNA, 25 bp, Homo sapiens
attgaactgtattcctgttttgtat

SEQ ID NO: 28675 - DNA, 25 bp, Homo sapiens
ccatatggactgtggatacctatct

SEQ ID NO: 28676 - DNA, 25 bp, Homo sapiens
gaagatggaactcgaaatcccaatg

SEQ ID NO: 28677 - DNA, 25 bp, Homo sapiens
gaagcatagcttttagctctaataa

SEQ ID NO: 28678 - DNA, 25 bp, Homo sapiens
gagatagcacagatggaccaaaggt

SEQ ID NO: 28679 - DNA, 25 bp, Homo sapiens
gccattcaggggtacttgtgcattt

SEQ ID NO: 28680 - DNA, 25 bp, Homo sapiens
taacattttaggtttctcttgcaga

SEQ ID NO: 28681 - DNA, 25 bp, Homo sapiens
tagtgtttctagcattatcccatcc

SEQ ID NO: 28682 - DNA, 25 bp, Homo sapiens
tatgcacaggtgggagtcttttgta

SEQ ID NO: 28683 - DNA, 25 bp, Homo sapiens
tcccatccctttgagccattcaggg

SEQ ID NO: 28684 - DNA, 25 bp, Homo sapiens
aatcttcttatcctctttgatattt

SEQ ID NO: 28685 - DNA, 25 bp, Homo sapiens
acatcattcatgatcaccttaatgc

SEQ ID NO: 28686 - DNA, 25 bp, Homo sapiens
agaaacgtggcagatccctgacatc

SEQ ID NO: 28687 - DNA, 25 bp, Homo sapiens
attgcaaacactcagtcttttatga

SEQ ID NO: 28688 - DNA, 25 bp, Homo sapiens
catgatggtcatgttccaggtgcta

SEQ ID NO: 28689 - DNA, 25 bp, Homo sapiens
cgacttctttggccagtgatgggga

SEQ ID NO: 28690 - DNA, 25 bp, Homo sapiens
gatattttattgcaaacactcagtc

SEQ ID NO: 28691 - DNA, 25 bp, Homo sapiens
gatcaccttaatgctcatgagacta

SEQ ID NO: 28692 - DNA, 25 bp, Homo sapiens
ggggaatcagtgagtgctccatgat

SEQ ID NO: 28693 - DNA, 25 bp, Homo sapiens
gggtccctccaaagttgaacacttg

SEQ ID NO: 28694 - DNA, 25 bp, Homo sapiens
gttccaggtgctagtacatcattca

SEQ ID NO: 28695 - DNA, 25 bp, Homo sapiens
atctcatgccactgcaagtgccatt

SEQ ID NO: 28696 - DNA, 25 bp, Homo sapiens
cacaggcactggcctgtgaccttcg

SEQ ID NO: 28697 - DNA, 25 bp, Homo sapiens
cagctgagtcccatcgatgttgaat

SEQ ID NO: 28698 - DNA, 25 bp, Homo sapiens
ccagactctgcacccggtgagtgag

SEQ ID NO: 28699 - DNA, 25 bp, Homo sapiens
cgtcctgggctttacgagaccatgc

SEQ ID NO: 28700 - DNA, 25 bp, Homo sapiens
gagaccatgcaagacgggggttagt

SEQ ID NO: 28701 - DNA, 25 bp, Homo sapiens
gagagaaaccctcttcatggaccag

SEQ ID NO: 28702 - DNA, 25 bp, Homo sapiens
gatgttgaatctcatgccactgcaa

SEQ ID NO: 28703 - DNA, 25 bp, Homo sapiens
gcaccaaagattccatcatcagggc

SEQ ID NO: 28704 - DNA, 25 bp, Homo sapiens
gcacccggtgagtgaggacagtccc

SEQ ID NO: 28705 - DNA, 25 bp, Homo sapiens
gtgggggtggggtgattgaatattt

SEQ ID NO: 28706 - DNA, 25 bp, Homo sapiens
acttcacctcttcctattgagtttg

SEQ ID NO: 28707 - DNA, 25 bp, Homo sapiens
atcatagcgagcacttttcctttcc

SEQ ID NO: 28708 - DNA, 25 bp, Homo sapiens
atgacgtctctattgtacaacctcc

SEQ ID NO: 28709 - DNA, 25 bp, Homo sapiens
cgcagccacgccgatggttatacag

SEQ ID NO: 28710 - DNA, 25 bp, Homo sapiens
gacagcatcaggcaactctgaactg

SEQ ID NO: 28711 - DNA, 25 bp, Homo sapiens
gcaaggtggctgaactatagtctgg

SEQ ID NO: 28712 - DNA, 25 bp, Homo sapiens
gcacatctcaccactcattggttaa

SEQ ID NO: 28713 - DNA, 25 bp, Homo sapiens
gcttcaggactacatatgacccaga

SEQ ID NO: 28714 - DNA, 25 bp, Homo sapiens
ggattgtgactgactctgcattttt

SEQ ID NO: 28715 - DNA, 25 bp, Homo sapiens
tgttcgaatgccttatagccttcct

SEQ ID NO: 28716 - DNA, 25 bp, Homo sapiens
ttggcaaccttcatgttaccccaaa

SEQ ID NO: 28717 - DNA, 25 bp, Homo sapiens
aacttgcccatattctaaatcatct

SEQ ID NO: 28718 - DNA, 25 bp, Homo sapiens
agctatgttggggcacatgtcctgc

SEQ ID NO: 28719 - DNA, 25 bp, Homo sapiens
agtttctttcatgctatttttattt

SEQ ID NO: 28720 - DNA, 25 bp, Homo sapiens
cccccaaatgtcacttctgcataaa

SEQ ID NO: 28721 - DNA, 25 bp, Homo sapiens
gctttgtcatccgtttttaattatt

SEQ ID NO: 28722 - DNA, 25 bp, Homo sapiens
gggtcaactgacatccattgtatat

SEQ ID NO: 28723 - DNA, 25 bp, Homo sapiens
gtaagtgcatatcctaacttgccca

SEQ ID NO: 28724 - DNA, 25 bp, Homo sapiens
gtcctgcaaatatggccctagaaac

SEQ ID NO: 28725 - DNA, 25 bp, Homo sapiens
tcatctggttggttttcagcctaga

SEQ ID NO: 28726 - DNA, 25 bp, Homo sapiens
tgaacaatcccggtgtgtcaggacc

SEQ ID NO: 28727 - DNA, 25 bp, Homo sapiens
ttaactgacccttgacaatcttgtc

SEQ ID NO: 28728 - DNA, 25 bp, Homo sapiens
aaaggttgccagcatggttgcagat

SEQ ID NO: 28729 - DNA, 25 bp, Homo sapiens
agccgctctggttgaagctttgctt

SEQ ID NO: 28730 - DNA, 25 bp, Homo sapiens
agggatgaactttttcctggcacga

SEQ ID NO: 28731 - DNA, 25 bp, Homo sapiens
atacttccaatgccctcaaggctgt

SEQ ID NO: 28732 - DNA, 25 bp, Homo sapiens
catagcacatcattcctcctatagg

SEQ ID NO: 28733 - DNA, 25 bp, Homo sapiens
cctggcacgaaaagtagccgctctg

SEQ ID NO: 28734 - DNA, 25 bp, Homo sapiens
gatgcctgaatgtatcctagctgac

SEQ ID NO: 28735 - DNA, 25 bp, Homo sapiens
ggaagattcttactgttaaccaaat

SEQ ID NO: 28736 - DNA, 25 bp, Homo sapiens
gtgaccttacagccattttacatag

SEQ ID NO: 28737 - DNA, 25 bp, Homo sapiens
tgtaacaggcttttatttccaggta

SEQ ID NO: 28738 - DNA, 25 bp, Homo sapiens
ttctgtagttgcagctgatgcctga

SEQ ID NO: 28739 - DNA, 25 bp, Homo sapiens
aagcagtgttcacacgggagccagc

SEQ ID NO: 28740 - DNA, 25 bp, Homo sapiens
acaggttggcgctggaggagccggg

SEQ ID NO: 28741 - DNA, 25 bp, Homo sapiens
agggagggacaggtgcctggagccc

SEQ ID NO: 28742 - DNA, 25 bp, Homo sapiens
atatttacgtattctccaaagcagt

SEQ ID NO: 28743 - DNA, 25 bp, Homo sapiens
caaggcagacacctactgcgcgtag

SEQ ID NO: 28744 - DNA, 25 bp, Homo sapiens
cacctacattccatagtgggcccgt

SEQ ID NO: 28745 - DNA, 25 bp, Homo sapiens
cctagctcaggtggcttcagggcct

SEQ ID NO: 28746 - DNA, 25 bp, Homo sapiens
cttcgccatgaccatgtactgccaa

SEQ ID NO: 28747 - DNA, 25 bp, Homo sapiens
gccaaaaggacgcccacggggagat

SEQ ID NO: 28748 - DNA, 25 bp, Homo sapiens
ggcctccagcactttttatatttac

SEQ ID NO: 28749 - DNA, 25 bp, Homo sapiens
gggctcctggtgcatcttaataaag

SEQ ID NO: 28750 - DNA, 25 bp, Homo sapiens
atattcctgggctgatccacaacat

SEQ ID NO: 28751 - DNA, 25 bp, Homo sapiens
cattgacatcagtcgagtcaccccc

SEQ ID NO: 28752 - DNA, 25 bp, Homo sapiens
ctatgaccgggacatcttgaccatt

SEQ ID NO: 28753 - DNA, 25 bp, Homo sapiens
gaacaaatatcagctccacctctga

SEQ ID NO: 28754 - DNA, 25 bp, Homo sapiens
gaggaacgtggctctagtgtctgga

SEQ ID NO: 28755 - DNA, 25 bp, Homo sapiens
gagtatgctgtgaagacccaccacc

SEQ ID NO: 28756 - DNA, 25 bp, Homo sapiens
gggagcagggctcaactggaggaac

SEQ ID NO: 28757 - DNA, 25 bp, Homo sapiens
tcatcaatgatctgtgtggtccccg

SEQ ID NO: 28758 - DNA, 25 bp, Homo sapiens
tcatgggccacctctgtggaaacca

SEQ ID NO: 28759 - DNA, 25 bp, Homo sapiens
tcccagccctactcgggatgagtgc

SEQ ID NO: 28760 - DNA, 25 bp, Homo sapiens
tccccgacgtaacatctggcgagac

SEQ ID NO: 28761 - DNA, 25 bp, Homo sapiens
aatcaaaatttctggggtgtgggca

SEQ ID NO: 28762 - DNA, 25 bp, Homo sapiens
agatttgtcagccctatctcaaact

SEQ ID NO: 28763 - DNA, 25 bp, Homo sapiens
attgttgacattcatgtctctgagt

SEQ ID NO: 28764 - DNA, 25 bp, Homo sapiens
cagccctatctcaaacttgaatcaa

SEQ ID NO: 28765 - DNA, 25 bp, Homo sapiens
gaccgtgcaaatgagctctgctcta

SEQ ID NO: 28766 - DNA, 25 bp, Homo sapiens
gccatgaaaaccttatgaccgtgca

SEQ ID NO: 28767 - DNA, 25 bp, Homo sapiens
ggcctgctttgaaatgcttgtctgc

SEQ ID NO: 28768 - DNA, 25 bp, Homo sapiens
gggtgtgggcacaataatctgtaat

SEQ ID NO: 28769 - DNA, 25 bp, Homo sapiens
gtctctgagttacaaaagtgctaat

SEQ ID NO: 28770 - DNA, 25 bp, Homo sapiens
gtgcctttactacttctttatgtaa

SEQ ID NO: 28771 - DNA, 25 bp, Homo sapiens
tgtgtaagtaaacattgtgccttta

SEQ ID NO: 28772 - DNA, 25 bp, Homo sapiens
aacaccacggtgcttttatacattg

SEQ ID NO: 28773 - DNA, 25 bp, Homo sapiens
aagatgataccttaaactcccactg

SEQ ID NO: 28774 - DNA, 25 bp, Homo sapiens
cactagggtgaagcctcacttccct

SEQ ID NO: 28775 - DNA, 25 bp, Homo sapiens
cataatctttctttgctgtgactga

SEQ ID NO: 28776 - DNA, 25 bp, Homo sapiens
catcccctttgtttgtgattgctgc

SEQ ID NO: 28777 - DNA, 25 bp, Homo sapiens
ctgctgcccgtgtgcatgaaggtac

SEQ ID NO: 28778 - DNA, 25 bp, Homo sapiens
gaaatgtatccctcgtttatcatcc

SEQ ID NO: 28779 - DNA, 25 bp, Homo sapiens
gagacagcatcggtgtctgctgctg

SEQ ID NO: 28780 - DNA, 25 bp, Homo sapiens
gagagtggaacggcttgctcttctt

SEQ ID NO: 28781 - DNA, 25 bp, Homo sapiens
gatagtgctctgtgcctaaggtgaa

SEQ ID NO: 28782 - DNA, 25 bp, Homo sapiens
tgtccccaggtcttgtgtgggtggc

SEQ ID NO: 28783 - DNA, 25 bp, Homo sapiens
aagctctcacacaaaccggaagcca

SEQ ID NO: 28784 - DNA, 25 bp, Homo sapiens
aatgtcccctatctcttgaatgatc

SEQ ID NO: 28785 - DNA, 25 bp, Homo sapiens
atctggggactgactgttgagctga

SEQ ID NO: 28786 - DNA, 25 bp, Homo sapiens
gcagcagctatagaccttaccatgg

SEQ ID NO: 28787 - DNA, 25 bp, Homo sapiens
gctctccatctctagatctggggac

SEQ ID NO: 28788 - DNA, 25 bp, Homo sapiens
gcttttgccctatcgtggaatttac

SEQ ID NO: 28789 - DNA, 25 bp, Homo sapiens
ggattgctgcaagagttacctgttg

SEQ ID NO: 28790 - DNA, 25 bp, Homo sapiens
gggctttgtttgcttattccatgaa

SEQ ID NO: 28791 - DNA, 25 bp, Homo sapiens
gtgatgtttcattctgaccttgtcc

SEQ ID NO: 28792 - DNA, 25 bp, Homo sapiens
gtggagtggcatgcttttgccctat

SEQ ID NO: 28793 - DNA, 25 bp, Homo sapiens
ttaaagccaagccacatcttatttt

SEQ ID NO: 28794 - DNA, 25 bp, Homo sapiens
aaactgaacatttgtatcccaagca

SEQ ID NO: 28795 - DNA, 25 bp, Homo sapiens
cctccattggagtttattgggacaa

SEQ ID NO: 28796 - DNA, 25 bp, Homo sapiens
ctgttccagaagtaccaggctgtag

SEQ ID NO: 28797 - DNA, 25 bp, Homo sapiens
gataagctagatgcagtagaccgaa

SEQ ID NO: 28798 - DNA, 25 bp, Homo sapiens
gccatctttaactgtcatcactggg

SEQ ID NO: 28799 - DNA, 25 bp, Homo sapiens
gtaccaggctgtagatttgataagc

SEQ ID NO: 28800 - DNA, 25 bp, Homo sapiens
gttgaattcttcatttttgccatct

SEQ ID NO: 28801 - DNA, 25 bp, Homo sapiens
tagaccgaaaccatccaaaacctgt

SEQ ID NO: 28802 - DNA, 25 bp, Homo sapiens
tagcttcttcctccattggagttta

SEQ ID NO: 28803 - DNA, 25 bp, Homo sapiens
tccaaaacctgtttagcttcttcct

SEQ ID NO: 28804 - DNA, 25 bp, Homo sapiens
ttttgccatctttaactgtcatcac

SEQ ID NO: 28805 - DNA, 25 bp, Homo sapiens
aatgtgaacgtcttctgctttacct

SEQ ID NO: 28806 - DNA, 25 bp, Homo sapiens
atctactcagacaggaccttcgcac

SEQ ID NO: 28807 - DNA, 25 bp, Homo sapiens
ccaacactaccaaatcccggatgac

SEQ ID NO: 28808 - DNA, 25 bp, Homo sapiens
ccgatgtccgtttgatcttcaagaa

SEQ ID NO: 28809 - DNA, 25 bp, Homo sapiens
ccggatgactttgtggccgatgtcc

SEQ ID NO: 28810 - DNA, 25 bp, Homo sapiens
cttcgcacctttgccagagtttgag

SEQ ID NO: 28811 - DNA, 25 bp, Homo sapiens
gaattccaggagcctgttcctgctt

SEQ ID NO: 28812 - DNA, 25 bp, Homo sapiens
gattcagaagtagctcaggcaggga

SEQ ID NO: 28813 - DNA, 25 bp, Homo sapiens
tgcgcaggggttaagccccgtggac

SEQ ID NO: 28814 - DNA, 25 bp, Homo sapiens
tgttcctgcttcgataccaaactac

SEQ ID NO: 28815 - DNA, 25 bp, Homo sapiens
ttctgctttacctctattgccatga

SEQ ID NO: 28816 - DNA, 25 bp, Homo sapiens
aaatggagtctcctatgtctacttc

SEQ ID NO: 28817 - DNA, 25 bp, Homo sapiens
aacaatctgatctctcttgcttttc

SEQ ID NO: 28818 - DNA, 25 bp, Homo sapiens
acattgaagttgtgtgcagtggctc

SEQ ID NO: 28819 - DNA, 25 bp, Homo sapiens
ccctccagcctgagctacagagaga

SEQ ID NO: 28820 - DNA, 25 bp, Homo sapiens
ctttcctaggcagaggtccctgcgg

SEQ ID NO: 28821 - DNA, 25 bp, Homo sapiens
gagcatgctgccttcaagcatctgt

SEQ ID NO: 28822 - DNA, 25 bp, Homo sapiens
taatccattcaactctgtgacacag

SEQ ID NO: 28823 - DNA, 25 bp, Homo sapiens
tggacaatacctggctttcctaggc

SEQ ID NO: 28824 - DNA, 25 bp, Homo sapiens
tgtgtccctgggtacttgagattag

SEQ ID NO: 28825 - DNA, 25 bp, Homo sapiens
ttaacaaagcacatcttgcaccgcc

SEQ ID NO: 28826 - DNA, 25 bp, Homo sapiens
tttccccacaggttgtcattactta

SEQ ID NO: 28827 - DNA, 25 bp, Homo sapiens
agctgcctcggactccaggaaaggc

SEQ ID NO: 28828 - DNA, 25 bp, Homo sapiens
cggctactgagtgctccaggaggac

SEQ ID NO: 28829 - DNA, 25 bp, Homo sapiens
ctcccagcatcaccaacgagtttgg

SEQ ID NO: 28830 - DNA, 25 bp, Homo sapiens
cttcccctgtgagcagcagagcagc

SEQ ID NO: 28831 - DNA, 25 bp, Homo sapiens
gaccaggcagtgactgcagccctgg

SEQ ID NO: 28832 - DNA, 25 bp, Homo sapiens
gacgatcatggtgggccaggacggc

SEQ ID NO: 28833 - DNA, 25 bp, Homo sapiens
gggacaagatactcaccaggaccag

SEQ ID NO: 28834 - DNA, 25 bp, Homo sapiens
taaatgaggccactgtgccaggctc

SEQ ID NO: 28835 - DNA, 25 bp, Homo sapiens
tcatcgctgtggtgcaagccatcgt

SEQ ID NO: 28836 - DNA, 25 bp, Homo sapiens
tcatctacaacctctggttcggcta

SEQ ID NO: 28837 - DNA, 25 bp, Homo sapiens
tctgcccaacgtcacgacagtggag

SEQ ID NO: 28838 - DNA, 25 bp, Homo sapiens
aaacctagcacattgggaagccaag

SEQ ID NO: 28839 - DNA, 25 bp, Homo sapiens
aatcccagccactccagaggctgag

SEQ ID NO: 28840 - DNA, 25 bp, Homo sapiens
aattacatttcctactgcagtattt

SEQ ID NO: 28841 - DNA, 25 bp, Homo sapiens
aattggccgggcgtgatggtgggcg

SEQ ID NO: 28842 - DNA, 25 bp, Homo sapiens
acaacacaatgttttcacgcctgta

SEQ ID NO: 28843 - DNA, 25 bp, Homo sapiens
cacactgtactctagcctgggagac

SEQ ID NO: 28844 - DNA, 25 bp, Homo sapiens
gagctatgattgcacactgtactct

SEQ ID NO: 28845 - DNA, 25 bp, Homo sapiens
ggcgtgatggtgggcgcctgtaatc

SEQ ID NO: 28846 - DNA, 25 bp, Homo sapiens
gtaatctcagtacattgggaggcca

SEQ ID NO: 28847 - DNA, 25 bp, Homo sapiens
taaatgtttttggccgggcgtggtg

SEQ ID NO: 28848 - DNA, 25 bp, Homo sapiens
ttcacgcctgtaaacctagcacatt

SEQ ID NO: 28849 - DNA, 25 bp, Homo sapiens
aaagaccacatcatcgaaaccgcaa

SEQ ID NO: 28850 - DNA, 25 bp, Homo sapiens
acaggtttctactccaaagaccaca

SEQ ID NO: 28851 - DNA, 25 bp, Homo sapiens
acgccttcttcaaagccatactatt

SEQ ID NO: 28852 - DNA, 25 bp, Homo sapiens
aggaggactactcaaaaccatacct

SEQ ID NO: 28853 - DNA, 25 bp, Homo sapiens
atacctttcctcacaggtttctact

SEQ ID NO: 28854 - DNA, 25 bp, Homo sapiens
atatcatacacaaacgcctgagccc

SEQ ID NO: 28855 - DNA, 25 bp, Homo sapiens
cctcaccattggcagcctagcatta

SEQ ID NO: 28856 - DNA, 25 bp, Homo sapiens
ctgacaagcgcctatagcactcgaa

SEQ ID NO: 28857 - DNA, 25 bp, Homo sapiens
ctgagccctatctattactctcatc

SEQ ID NO: 28858 - DNA, 25 bp, Homo sapiens
gaaaccgcaaacatatcatacacaa

SEQ ID NO: 28859 - DNA, 25 bp, Homo sapiens
tatttatgtgctccggatccatcat

SEQ ID NO: 28860 - DNA, 25 bp, Homo sapiens
caaattcaaggtggcgtccttccgt

SEQ ID NO: 28861 - DNA, 25 bp, Homo sapiens
cacagtcctctccgattatgtgggc

SEQ ID NO: 28862 - DNA, 25 bp, Homo sapiens
caccgctatgtctggctggtttacg

SEQ ID NO: 28863 - DNA, 25 bp, Homo sapiens
ccatcctcagcaaccgatctggaga

SEQ ID NO: 28864 - DNA, 25 bp, Homo sapiens
ccccccttggcatgggtgagacctg

SEQ ID NO: 28865 - DNA, 25 bp, Homo sapiens
cctgctgcctggcctttataatttt

SEQ ID NO: 28866 - DNA, 25 bp, Homo sapiens
ctggcacgtgttaccaggccgagtg

SEQ ID NO: 28867 - DNA, 25 bp, Homo sapiens
ggatgactatgtgcccaaactgtac

SEQ ID NO: 28868 - DNA, 25 bp, Homo sapiens
ggccgctaaagtgtgacgagcccat

SEQ ID NO: 28869 - DNA, 25 bp, Homo sapiens
tggggacctgaactgtcctggaggc

SEQ ID NO: 28870 - DNA, 25 bp, Homo sapiens
ttccccagttcagtgttgcatgtat

SEQ ID NO: 28871 - DNA, 25 bp, Homo sapiens
aacctggaaaagctgttgctgctat

SEQ ID NO: 28872 - DNA, 25 bp, Homo sapiens
agctgtgctgtcaactttggaaaaa

SEQ ID NO: 28873 - DNA, 25 bp, Homo sapiens
cagccatattggtctagaaacgtta

SEQ ID NO: 28874 - DNA, 25 bp, Homo sapiens
catactgctattggtctttttatat

SEQ ID NO: 28875 - DNA, 25 bp, Homo sapiens
gatgcataacatactgctattggtc

SEQ ID NO: 28876 - DNA, 25 bp, Homo sapiens
gctgttgctgctattgatgcataac

SEQ ID NO: 28877 - DNA, 25 bp, Homo sapiens
ggggtaacgcactgtattaaatatg

SEQ ID NO: 28878 - DNA, 25 bp, Homo sapiens
gtatcccggtttactgtgttgagtt

SEQ ID NO: 28879 - DNA, 25 bp, Homo sapiens
gtgttgagttggcattgtacagaaa

SEQ ID NO: 28880 - DNA, 25 bp, Homo sapiens
taaggtcttatctacatgggtttga

SEQ ID NO: 28881 - DNA, 25 bp, Homo sapiens
tttccatttgtacaggggtaacgca

SEQ ID NO: 28882 - DNA, 25 bp, Homo sapiens
aaagaggctggaggctcctgtaccc

SEQ ID NO: 28883 - DNA, 25 bp, Homo sapiens
aaccttttacccacgtcaatggcat

SEQ ID NO: 28884 - DNA, 25 bp, Homo sapiens
catgcagcacattatcatttgttat

SEQ ID NO: 28885 - DNA, 25 bp, Homo sapiens
ccaccactaccacagaaagaggctg

SEQ ID NO: 28886 - DNA, 25 bp, Homo sapiens
ccctgttcattccttaagggccctg

SEQ ID NO: 28887 - DNA, 25 bp, Homo sapiens
ctttgagtatctttttccacattaa

SEQ ID NO: 28888 - DNA, 25 bp, Homo sapiens
gaactagtgctactgaactgtttaa

SEQ ID NO: 28889 - DNA, 25 bp, Homo sapiens
gaggagcagtggagcctcatgcagc

SEQ ID NO: 28890 - DNA, 25 bp, Homo sapiens
gccctgcttcccttaataagtaagt

SEQ ID NO: 28891 - DNA, 25 bp, Homo sapiens
ggcatattctgggaatcaccaccac

SEQ ID NO: 28892 - DNA, 25 bp, Homo sapiens
gttggtctacggccctaaatatgca

SEQ ID NO: 28893 - DNA, 25 bp, Homo sapiens
aagtttctttgcactgttgcactta

SEQ ID NO: 28894 - DNA, 25 bp, Homo sapiens
agggcccaaatgcataagtttcttt

SEQ ID NO: 28895 - DNA, 25 bp, Homo sapiens
atataaatgttgtccacttcccttt

SEQ ID NO: 28896 - DNA, 25 bp, Homo sapiens
cataatttgtttaggctcccacata

SEQ ID NO: 28897 - DNA, 25 bp, Homo sapiens
ccttttccacaggcctagaacagtt

SEQ ID NO: 28898 - DNA, 25 bp, Homo sapiens
gaggatttggctaccctgagtatat

SEQ ID NO: 28899 - DNA, 25 bp, Homo sapiens
ggccaacaactttggttcatccttt

SEQ ID NO: 28900 - DNA, 25 bp, Homo sapiens
tcacttgtggttctacattcctggt

SEQ ID NO: 28901 - DNA, 25 bp, Homo sapiens
tgaatgttgctgtcaaagggctgcc

SEQ ID NO: 28902 - DNA, 25 bp, Homo sapiens
tgccccctaccttataagggttgct

SEQ ID NO: 28903 - DNA, 25 bp, Homo sapiens
ttatattcatttcttctgttctcct

SEQ ID NO: 28904 - DNA, 25 bp, Homo sapiens
aaaaactcatttatacctgtgtatt

SEQ ID NO: 28905 - DNA, 25 bp, Homo sapiens
aaagctacaatctgttcaatgtttt

SEQ ID NO: 28906 - DNA, 25 bp, Homo sapiens
aatggagctatgtcttgttttaagt

SEQ ID NO: 28907 - DNA, 25 bp, Homo sapiens
agttggtcttttgacgagagggagg

SEQ ID NO: 28908 - DNA, 25 bp, Homo sapiens
cacggtcagttgtaactttgccttc

SEQ ID NO: 28909 - DNA, 25 bp, Homo sapiens
ctgcccaggatgctgctatatatat

SEQ ID NO: 28910 - DNA, 25 bp, Homo sapiens
gaaacttgtcaccatgagatagcat

SEQ ID NO: 28911 - DNA, 25 bp, Homo sapiens
gactatccaacttaacatgaaactt

SEQ ID NO: 28912 - DNA, 25 bp, Homo sapiens
gagagggaggatgtcacggtcagtt

SEQ ID NO: 28913 - DNA, 25 bp, Homo sapiens
gagatagcattagctgcccaggatg

SEQ ID NO: 28914 - DNA, 25 bp, Homo sapiens
gtgcctccttgacatttcgttcaag

SEQ ID NO: 28915 - DNA, 25 bp, Homo sapiens
aaagctttgtttgtctagtgctctt

SEQ ID NO: 28916 - DNA, 25 bp, Homo sapiens
aaatagactgtagtacaccctagta

SEQ ID NO: 28917 - DNA, 25 bp, Homo sapiens
accatgtatcagtgcctggcttttt

SEQ ID NO: 28918 - DNA, 25 bp, Homo sapiens
aggagcaatccttttataccatgaa

SEQ ID NO: 28919 - DNA, 25 bp, Homo sapiens
gactgtagtacaccctagtaggaaa

SEQ ID NO: 28920 - DNA, 25 bp, Homo sapiens
gagatttaccatgtatcagtgcctg

SEQ ID NO: 28921 - DNA, 25 bp, Homo sapiens
gcaatccttttataccatgaatatt

SEQ ID NO: 28922 - DNA, 25 bp, Homo sapiens
ggcttatttttcgcaggagcaatcc

SEQ ID NO: 28923 - DNA, 25 bp, Homo sapiens
gtctagtgctcttttgctataaaat

SEQ ID NO: 28924 - DNA, 25 bp, Homo sapiens
gtttgtctagtgctcttttgctata

SEQ ID NO: 28925 - DNA, 25 bp, Homo sapiens
tcagtgcctggctttttgttataaa

SEQ ID NO: 28926 - DNA, 25 bp, Homo sapiens
aaaaaggtttctgcacattgttgtg

SEQ ID NO: 28927 - DNA, 25 bp, Homo sapiens
aagcagccctttttacagtctagtt

SEQ ID NO: 28928 - DNA, 25 bp, Homo sapiens
aaggatacggctgcagtattactaa

SEQ ID NO: 28929 - DNA, 25 bp, Homo sapiens
atatcttcgagacttgggtgtttgt

SEQ ID NO: 28930 - DNA, 25 bp, Homo sapiens
ctaatcctcccatttgggcagtata

SEQ ID NO: 28931 - DNA, 25 bp, Homo sapiens
gaactctgaatatgccttctttttt

SEQ ID NO: 28932 - DNA, 25 bp, Homo sapiens
gataggttcctcaggtgaccaaaac

SEQ ID NO: 28933 - DNA, 25 bp, Homo sapiens
gatgtgtttgcaaggatacggctgc

SEQ ID NO: 28934 - DNA, 25 bp, Homo sapiens
gggcagtataggtgtttgctttttt

SEQ ID NO: 28935 - DNA, 25 bp, Homo sapiens
tctaaccatgtatctaatcctccca

SEQ ID NO: 28936 - DNA, 25 bp, Homo sapiens
tttcctgagggatttctaaccatgt

SEQ ID NO: 28937 - DNA, 25 bp, Homo sapiens
aatagtctctataatgcccatccag

SEQ ID NO: 28938 - DNA, 25 bp, Homo sapiens
ataaccccttattagagagacagtg

SEQ ID NO: 28939 - DNA, 25 bp, Homo sapiens
attgcacttttgtttaactagaata

SEQ ID NO: 28940 - DNA, 25 bp, Homo sapiens
cagttatcttagtttaccggtggag

SEQ ID NO: 28941 - DNA, 25 bp, Homo sapiens
catatttagtatcttccctttgcag

SEQ ID NO: 28942 - DNA, 25 bp, Homo sapiens
ctctaattctacccacatgatcttt

SEQ ID NO: 28943 - DNA, 25 bp, Homo sapiens
ctgttgctttgtcatgagttagtca

SEQ ID NO: 28944 - DNA, 25 bp, Homo sapiens
gatagtcctttatgcaatgtcttag

SEQ ID NO: 28945 - DNA, 25 bp, Homo sapiens
gcaatgtcttagcaatagtctctat

SEQ ID NO: 28946 - DNA, 25 bp, Homo sapiens
ggtggagtatttcaacaccaaccac

SEQ ID NO: 28947 - DNA, 25 bp, Homo sapiens
tacccacatgatctttattccttcc

SEQ ID NO: 28948 - DNA, 25 bp, Homo sapiens
cctgcagctacttggtgacttaaca

SEQ ID NO: 28949 - DNA, 25 bp, Homo sapiens
ctgtcacttcagggcatcgggactg

SEQ ID NO: 28950 - DNA, 25 bp, Homo sapiens
gatgcaactggcgaaccttggagag

SEQ ID NO: 28951 - DNA, 25 bp, Homo sapiens
gcgcccttgttatgtgctattttaa

SEQ ID NO: 28952 - DNA, 25 bp, Homo sapiens
gctgattgtcttgaccaaacccaca

SEQ ID NO: 28953 - DNA, 25 bp, Homo sapiens
gtctctgcacctacttttgcagaat

SEQ ID NO: 28954 - DNA, 25 bp, Homo sapiens
gttacccatgtatgctgtgtttatc

SEQ ID NO: 28955 - DNA, 25 bp, Homo sapiens
gtttatcatgtgtatatcgtccaga

SEQ ID NO: 28956 - DNA, 25 bp, Homo sapiens
taacaactccaggagccctgtcagc

SEQ ID NO: 28957 - DNA, 25 bp, Homo sapiens
tacaaaccacattacttctgtcact

SEQ ID NO: 28958 - DNA, 25 bp, Homo sapiens
tgctgttcatcccacatcgtgtggg

SEQ ID NO: 28959 - DNA, 25 bp, Homo sapiens
caacccagacacttgcgttcacaag

SEQ ID NO: 28960 - DNA, 25 bp, Homo sapiens
ccggctgggtttgccaagtcaggga

SEQ ID NO: 28961 - DNA, 25 bp, Homo sapiens
ccttcaccatcgcgtgggattggga

SEQ ID NO: 28962 - DNA, 25 bp, Homo sapiens
gaactcccaaaccttggctttgaat

SEQ ID NO: 28963 - DNA, 25 bp, Homo sapiens
gaactgattttgatcttcttgtcta

SEQ ID NO: 28964 - DNA, 25 bp, Homo sapiens
gacactcaggtcatagcctcagagg

SEQ ID NO: 28965 - DNA, 25 bp, Homo sapiens
gagcacttagagttatggcccaggc

SEQ ID NO: 28966 - DNA, 25 bp, Homo sapiens
gctagattcctctaaggtctctgag

SEQ ID NO: 28967 - DNA, 25 bp, Homo sapiens
gtctctgagatgcaccgttttttaa

SEQ ID NO: 28968 - DNA, 25 bp, Homo sapiens
tggacgtgcaaggtacctgtcccag

SEQ ID NO: 28969 - DNA, 25 bp, Homo sapiens
tgggaggaggggcctccgtgagcag

SEQ ID NO: 28970 - DNA, 25 bp, Homo sapiens
acggcatagcttaggtgcgccgtcc

SEQ ID NO: 28971 - DNA, 25 bp, Homo sapiens
agaaaccattctgggagccgtggat

SEQ ID NO: 28972 - DNA, 25 bp, Homo sapiens
cacagtggggtctctcggaagccac

SEQ ID NO: 28973 - DNA, 25 bp, Homo sapiens
cctggggctcaggtacacagtgggg

SEQ ID NO: 28974 - DNA, 25 bp, Homo sapiens
ctcccttttccagaacaccaggtgt

SEQ ID NO: 28975 - DNA, 25 bp, Homo sapiens
gaagtcacagtggccttgttggtgc

SEQ ID NO: 28976 - DNA, 25 bp, Homo sapiens
ggaagccaccgtgtggttctttcac

SEQ ID NO: 28977 - DNA, 25 bp, Homo sapiens
gggcctgaatactggccctggactc

SEQ ID NO: 28978 - DNA, 25 bp, Homo sapiens
tccagggtgcagtacagcagggcct

SEQ ID NO: 28979 - DNA, 25 bp, Homo sapiens
tggggtttggtgcagtttccagggt

SEQ ID NO: 28980 - DNA, 25 bp, Homo sapiens
tggttctttcacaggcacgtttatt

SEQ ID NO: 28981 - DNA, 25 bp, Homo sapiens
accttctgttgtctacagctttttt

SEQ ID NO: 28982 - DNA, 25 bp, Homo sapiens
agttttcattactgactctgtaaaa

SEQ ID NO: 28983 - DNA, 25 bp, Homo sapiens
caattctaacttgtctattctaacc

SEQ ID NO: 28984 - DNA, 25 bp, Homo sapiens
ctgtgtgttattttgccagctgctg

SEQ ID NO: 28985 - DNA, 25 bp, Homo sapiens
gcaaagtacattcctttctgtggta

SEQ ID NO: 28986 - DNA, 25 bp, Homo sapiens
gcatatctgctaaagagctgtcagt

SEQ ID NO: 28987 - DNA, 25 bp, Homo sapiens
gtatccatctcattgtacagtgttt

SEQ ID NO: 28988 - DNA, 25 bp, Homo sapiens
gtctattctaacctattgtgtacaa

SEQ ID NO: 28989 - DNA, 25 bp, Homo sapiens
tacagtgttttagttgcaagcagaa

SEQ ID NO: 28990 - DNA, 25 bp, Homo sapiens
tccagtttaccttctgttgtctaca

SEQ ID NO: 28991 - DNA, 25 bp, Homo sapiens
tctgtggtattttgtcctgtaactg

SEQ ID NO: 28992 - DNA, 25 bp, Homo sapiens
cagagacttgttgcatctttgtccc

SEQ ID NO: 28993 - DNA, 25 bp, Homo sapiens
cagatgctcaagtccatgtgtgccg

SEQ ID NO: 28994 - DNA, 25 bp, Homo sapiens
ctacatgttacctccttcaattgat

SEQ ID NO: 28995 - DNA, 25 bp, Homo sapiens
gaaacaaaggcagcgctgccctcgg

SEQ ID NO: 28996 - DNA, 25 bp, Homo sapiens
gacctgctgaagctgaacgtggccc

SEQ ID NO: 28997 - DNA, 25 bp, Homo sapiens
gacgtgttcaagatcctggtggacc

SEQ ID NO: 28998 - DNA, 25 bp, Homo sapiens
gatggagctgtacgagctggcgcag

SEQ ID NO: 28999 - DNA, 25 bp, Homo sapiens
gcagcacctaggatggggcagagac

SEQ ID NO: 29000 - DNA, 25 bp, Homo sapiens
gccgggcagaggctagcgagcgagc

SEQ ID NO: 29001 - DNA, 25 bp, Homo sapiens
gcctgggaagagccctacacggggc

SEQ ID NO: 29002 - DNA, 25 bp, Homo sapiens
gcgctgcggcggaagaaggtgctga

SEQ ID NO: 29003 - DNA, 25 bp, Homo sapiens
actggtattgctcgagttccacttg

SEQ ID NO: 29004 - DNA, 25 bp, Homo sapiens
caaggccctagactcatcttggccc

SEQ ID NO: 29005 - DNA, 25 bp, Homo sapiens
caccaaggccctagactcatcttgg

SEQ ID NO: 29006 - DNA, 25 bp, Homo sapiens
ctcctggtatgagacctcctatggg

SEQ ID NO: 29007 - DNA, 25 bp, Homo sapiens
ctggtatgagacctcctatgggtcc

SEQ ID NO: 29008 - DNA, 25 bp, Homo sapiens
gacctcctcccaaagatactggtat

SEQ ID NO: 29009 - DNA, 25 bp, Homo sapiens
gatactggtattgctcgagttccac

SEQ ID NO: 29010 - DNA, 25 bp, Homo sapiens
ggaagagggactccaatgggcatgc

SEQ ID NO: 29011 - DNA, 25 bp, Homo sapiens
gggccatcccaacaggtgatgaccc

SEQ ID NO: 29012 - DNA, 25 bp, Homo sapiens
tgctcgagttccacttgctggagct

SEQ ID NO: 29013 - DNA, 25 bp, Homo sapiens
ttgctcgagttccacttgctggagc

SEQ ID NO: 29014 - DNA, 25 bp, Homo sapiens
aaagaactcacatcccatctgaaac

SEQ ID NO: 29015 - DNA, 25 bp, Homo sapiens
aagaccaccacatagaatacccctt

SEQ ID NO: 29016 - DNA, 25 bp, Homo sapiens
aatggcctagtactgtggaatttta

SEQ ID NO: 29017 - DNA, 25 bp, Homo sapiens
atattggagactcaactgcccttgg

SEQ ID NO: 29018 - DNA, 25 bp, Homo sapiens
atttcttgtctgcagaacatcctat

SEQ ID NO: 29019 - DNA, 25 bp, Homo sapiens
cagctcgctctgatttagccttaat

SEQ ID NO: 29020 - DNA, 25 bp, Homo sapiens
catcccatctgaaacttcccagggg

SEQ ID NO: 29021 - DNA, 25 bp, Homo sapiens
gtactttcaaatattgtccacttta

SEQ ID NO: 29022 - DNA, 25 bp, Homo sapiens
tcccatttttggtatcttgttcagc

SEQ ID NO: 29023 - DNA, 25 bp, Homo sapiens
tcctttcaagcaccacagcttcaga

SEQ ID NO: 29024 - DNA, 25 bp, Homo sapiens
tggagggattgtcctttcaagcacc

SEQ ID NO: 29025 - DNA, 25 bp, Homo sapiens
aggcagtggttgttcctcataggta

SEQ ID NO: 29026 - DNA, 25 bp, Homo sapiens
gaacgttccagccaggcagtggttg

SEQ ID NO: 29027 - DNA, 25 bp, Homo sapiens
gcacatccacggtgggtgagtggcc

SEQ ID NO: 29028 - DNA, 25 bp, Homo sapiens
gtatatacgtgcacatttgaccttt

SEQ ID NO: 29029 - DNA, 25 bp, Homo sapiens
gtcatctcggaagtcgtagggcagc

SEQ ID NO: 29030 - DNA, 25 bp, Homo sapiens
gtccttggtgggtttagtcatctcg

SEQ ID NO: 29031 - DNA, 25 bp, Homo sapiens
taggtaggtggccttggccttcatc

SEQ ID NO: 29032 - DNA, 25 bp, Homo sapiens
tccattgcatttgtcacctagtcac

SEQ ID NO: 29033 - DNA, 25 bp, Homo sapiens
tgtctggaatgtggccttccacggt

SEQ ID NO: 29034 - DNA, 25 bp, Homo sapiens
ttctcattcccttaactgacattat

SEQ ID NO: 29035 - DNA, 25 bp, Homo sapiens
tttagtgtcagaggccgagcacagt

SEQ ID NO: 29036 - DNA, 25 bp, Homo sapiens
aaggaggcaatctcagtctcggtct

SEQ ID NO: 29037 - DNA, 25 bp, Homo sapiens
aagtaagagttcatcatttggtaga

SEQ ID NO: 29038 - DNA, 25 bp, Homo sapiens
aagtggtctaggtccagatctcatt

SEQ ID NO: 29039 - DNA, 25 bp, Homo sapiens
agaagatctgaatcactgtccccaa

SEQ ID NO: 29040 - DNA, 25 bp, Homo sapiens
atctgaatcactgtccccaagaaga

SEQ ID NO: 29041 - DNA, 25 bp, Homo sapiens
gaatgagtcagccagaggccggaaa

SEQ ID NO: 29042 - DNA, 25 bp, Homo sapiens
gacagagatagttactctccccggt

SEQ ID NO: 29043 - DNA, 25 bp, Homo sapiens
gatggttggagatgtccacgaggaa

SEQ ID NO: 29044 - DNA, 25 bp, Homo sapiens
taggtccagatctcattctaggtcc

SEQ ID NO: 29045 - DNA, 25 bp, Homo sapiens
taggtccccctcaagatgtagaaca

SEQ ID NO: 29046 - DNA, 25 bp, Homo sapiens
tctcagtctcggtctccaaaaaggg

SEQ ID NO: 29047 - DNA, 25 bp, Homo sapiens
acctatgagacccttacgtgattgt

SEQ ID NO: 29048 - DNA, 25 bp, Homo sapiens
actggttgtcacctatgagaccctt

SEQ ID NO: 29049 - DNA, 25 bp, Homo sapiens
gaaaagtaactggttgtcacctatg

SEQ ID NO: 29050 - DNA, 25 bp, Homo sapiens
gaagtgaagtgatggactccgattt

SEQ ID NO: 29051 - DNA, 25 bp, Homo sapiens
gagacccttacgtgattgttagtta

SEQ ID NO: 29052 - DNA, 25 bp, Homo sapiens
gatgattcactgttggggagaagaa

SEQ ID NO: 29053 - DNA, 25 bp, Homo sapiens
gatggactccgatttggagagtagt

SEQ ID NO: 29054 - DNA, 25 bp, Homo sapiens
ggccttgatgattcactgttgggga

SEQ ID NO: 29055 - DNA, 25 bp, Homo sapiens
gtttaagcaccatggccttgatgat

SEQ ID NO: 29056 - DNA, 25 bp, Homo sapiens
ttcaaagcagctgtaatttagttaa

SEQ ID NO: 29057 - DNA, 25 bp, Homo sapiens
ttgtcacctatgagacccttacgtg

SEQ ID NO: 29058 - DNA, 25 bp, Homo sapiens
aaatactctaacagctgtccagtgt

SEQ ID NO: 29059 - DNA, 25 bp, Homo sapiens
aggatgcctggattccttgttatct

SEQ ID NO: 29060 - DNA, 25 bp, Homo sapiens
atttaagtgttactgtggcttcaaa

SEQ ID NO: 29061 - DNA, 25 bp, Homo sapiens
ccaaccaaccaaatttctgcattcg

SEQ ID NO: 29062 - DNA, 25 bp, Homo sapiens
ccactctggtggataagttcaataa

SEQ ID NO: 29063 - DNA, 25 bp, Homo sapiens
cgtcacttgcaacttgctattcgtg

SEQ ID NO: 29064 - DNA, 25 bp, Homo sapiens
gggttttgattgagttgactgtttt

SEQ ID NO: 29065 - DNA, 25 bp, Homo sapiens
tctgcattcgagtcttaaccatatt

SEQ ID NO: 29066 - DNA, 25 bp, Homo sapiens
tgcaacttgctattcgtggagatga

SEQ ID NO: 29067 - DNA, 25 bp, Homo sapiens
tgcctttttgtaattctatttgagc

SEQ ID NO: 29068 - DNA, 25 bp, Homo sapiens
ttccttgttatctcaggactctaaa

SEQ ID NO: 29069 - DNA, 25 bp, Homo sapiens
aagacacctccgagtgtctgctcac

SEQ ID NO: 29070 - DNA, 25 bp, Homo sapiens
agaatggcggcagcagagcatcgtc

SEQ ID NO: 29071 - DNA, 25 bp, Homo sapiens
ataactgataactccctgagcctca

SEQ ID NO: 29072 - DNA, 25 bp, Homo sapiens
atgtgtgaaaacattccctcctttg

SEQ ID NO: 29073 - DNA, 25 bp, Homo sapiens
ccccttccaccctcagtggatgata

SEQ ID NO: 29074 - DNA, 25 bp, Homo sapiens
gtgcagactgtgttggtggcggtaa

SEQ ID NO: 29075 - DNA, 25 bp, Homo sapiens
tcctccaactcaacaacattctata

SEQ ID NO: 29076 - DNA, 25 bp, Homo sapiens
tgataatctcaagacacctcccaag

SEQ ID NO: 29077 - DNA, 25 bp, Homo sapiens
agaggaaggcgatactctcgctcac

SEQ ID NO: 29078 - DNA, 25 bp, Homo sapiens
agcatctcctcgacgatcaagatct

SEQ ID NO: 29079 - DNA, 25 bp, Homo sapiens
caatccccgtcgaggtcaagatcaa

SEQ ID NO: 29080 - DNA, 25 bp, Homo sapiens
cgaccaagaagcagtcgttccccat

SEQ ID NO: 29081 - DNA, 25 bp, Homo sapiens
ctctcgctcacgcagcaggagcagg

SEQ ID NO: 29082 - DNA, 25 bp, Homo sapiens
gatcaagatctatctctcttcgtag

SEQ ID NO: 29083 - DNA, 25 bp, Homo sapiens
gcaggtcacggtctagatcacattc

SEQ ID NO: 29084 - DNA, 25 bp, Homo sapiens
ggactgaagctctcaagttcaccct

SEQ ID NO: 29085 - DNA, 25 bp, Homo sapiens
ggatcgaggtatttccaatccccgt

SEQ ID NO: 29086 - DNA, 25 bp, Homo sapiens
tccccatcaggaagtcctcgcagaa

SEQ ID NO: 29087 - DNA, 25 bp, Homo sapiens
tgattgtcatcgttacagccggcga

SEQ ID NO: 29088 - DNA, 25 bp, Homo sapiens
aacacagactgtccaagctctgcag

SEQ ID NO: 29089 - DNA, 25 bp, Homo sapiens
agctctgcagtattcaactgttgat

SEQ ID NO: 29090 - DNA, 25 bp, Homo sapiens
attcggaactgtgaagcaccttata

SEQ ID NO: 29091 - DNA, 25 bp, Homo sapiens
gaggactctagacaacaacttagca

SEQ ID NO: 29092 - DNA, 25 bp, Homo sapiens
gatggtccactaacagcaagcaaag

SEQ ID NO: 29093 - DNA, 25 bp, Homo sapiens
gccaccatctgccatttgttggttt

SEQ ID NO: 29094 - DNA, 25 bp, Homo sapiens
gtactttctgatcggagctgtttaa

SEQ ID NO: 29095 - DNA, 25 bp, Homo sapiens
gtagctgtgtactttctgatcggag

SEQ ID NO: 29096 - DNA, 25 bp, Homo sapiens
gttagtagcccaacagatacatcga

SEQ ID NO: 29097 - DNA, 25 bp, Homo sapiens
tcccacctcactggatcttgatgtt

SEQ ID NO: 29098 - DNA, 25 bp, Homo sapiens
tgtttaagagttacggctggtccca

SEQ ID NO: 29099 - DNA, 25 bp, Homo sapiens
acttcttgctggtctagtcacgcat

SEQ ID NO: 29100 - DNA, 25 bp, Homo sapiens
agaggcagcagagcattcagactcc

SEQ ID NO: 29101 - DNA, 25 bp, Homo sapiens
aggaccctgtgagccgattgtccta

SEQ ID NO: 29102 - DNA, 25 bp, Homo sapiens
agtcacgcatgcagtgttggggatg

SEQ ID NO: 29103 - DNA, 25 bp, Homo sapiens
gagcattcagactccaaacagaccc

SEQ ID NO: 29104 - DNA, 25 bp, Homo sapiens
gagtgagcatggaacacttcgagtt

SEQ ID NO: 29105 - DNA, 25 bp, Homo sapiens
ggatcggacatgaaaggaccctgtg

SEQ ID NO: 29106 - DNA, 25 bp, Homo sapiens
gtggctccctcggaatgctaagggg

SEQ ID NO: 29107 - DNA, 25 bp, Homo sapiens
gttatcagtgcttcccgagtgagca

SEQ ID NO: 29108 - DNA, 25 bp, Homo sapiens
tggggatgccttggtttttactgct

SEQ ID NO: 29109 - DNA, 25 bp, Homo sapiens
ttatagacagtcgttcccagtgtgg

SEQ ID NO: 29110 - DNA, 25 bp, Homo sapiens
acatcactggtgtccctataaggga

SEQ ID NO: 29111 - DNA, 25 bp, Homo sapiens
cagatgctttcattatggcctccag

SEQ ID NO: 29112 - DNA, 25 bp, Homo sapiens
cccactccatatttgtaagccctaa

SEQ ID NO: 29113 - DNA, 25 bp, Homo sapiens
cgatccctaatctgacatcactggt

SEQ ID NO: 29114 - DNA, 25 bp, Homo sapiens
gaagcaactttgtatctcaggtctt

SEQ ID NO: 29115 - DNA, 25 bp, Homo sapiens
gaggttgttgggttcgatccctaat

SEQ ID NO: 29116 - DNA, 25 bp, Homo sapiens
ggagaagactgtgtggatccaccag

SEQ ID NO: 29117 - DNA, 25 bp, Homo sapiens
gtcctagttccttacactataactg

SEQ ID NO: 29118 - DNA, 25 bp, Homo sapiens
tcaagccttaccaaacacatcagaa

SEQ ID NO: 29119 - DNA, 25 bp, Homo sapiens
ttgctgaattctcaagccttaccaa

SEQ ID NO: 29120 - DNA, 25 bp, Homo sapiens
ttgtaagccctaagtcctagttcct

SEQ ID NO: 29121 - DNA, 25 bp, Homo sapiens
acatctttgttgacccggtacttca

SEQ ID NO: 29122 - DNA, 25 bp, Homo sapiens
atgtcctgtctcatggaagcactgg

SEQ ID NO: 29123 - DNA, 25 bp, Homo sapiens
gaactacattctctctgtgatcagt

SEQ ID NO: 29124 - DNA, 25 bp, Homo sapiens
gacgtctccatctaagaactacatt

SEQ ID NO: 29125 - DNA, 25 bp, Homo sapiens
gcaaaaagcgcctcaatgaccggat

SEQ ID NO: 29126 - DNA, 25 bp, Homo sapiens
ggcctgatgtgtggacggatcacca

SEQ ID NO: 29127 - DNA, 25 bp, Homo sapiens
gtatattgttcctgattggcctgat

SEQ ID NO: 29128 - DNA, 25 bp, Homo sapiens
gtgaggttacagcccgagtgcaaaa

SEQ ID NO: 29129 - DNA, 25 bp, Homo sapiens
tactgcttgtgccctggacattaaa

SEQ ID NO: 29130 - DNA, 25 bp, Homo sapiens
tggacattaaacaccactgcgcagc

SEQ ID NO: 29131 - DNA, 25 bp, Homo sapiens
tggcttctctgatcttgccatgcaa

SEQ ID NO: 29132 - DNA, 25 bp, Homo sapiens
aaaaagcttttgtctacacaccctg

SEQ ID NO: 29133 - DNA, 25 bp, Homo sapiens
aatgtgtctttagatagccctgtcc

SEQ ID NO: 29134 - DNA, 25 bp, Homo sapiens
attacagtgtttatcctttcatata

SEQ ID NO: 29135 - DNA, 25 bp, Homo sapiens
attgttgtccttttcataggtctga

SEQ ID NO: 29136 - DNA, 25 bp, Homo sapiens
caatagccactaaccttgcctggta

SEQ ID NO: 29137 - DNA, 25 bp, Homo sapiens
gcaggttcttgttggtgcacagcac

SEQ ID NO: 29138 - DNA, 25 bp, Homo sapiens
gccctgtcctggtggtattttcaat

SEQ ID NO: 29139 - DNA, 25 bp, Homo sapiens
gttgcagctgttttgttgacattct

SEQ ID NO: 29140 - DNA, 25 bp, Homo sapiens
gttgtctctgatgcagcttatacga

SEQ ID NO: 29141 - DNA, 25 bp, Homo sapiens
gttttttcatcttcagttgtctctg

SEQ ID NO: 29142 - DNA, 25 bp, Homo sapiens
tctacacaccctgcatatcataatg

SEQ ID NO: 29143 - DNA, 25 bp, Homo sapiens
aaaattggcaaccagccactatttt

SEQ ID NO: 29144 - DNA, 25 bp, Homo sapiens
aaatgctgtaaccaacttatctaat

SEQ ID NO: 29145 - DNA, 25 bp, Homo sapiens
accagccactattttgttgactatg

SEQ ID NO: 29146 - DNA, 25 bp, Homo sapiens
atggctaggctactgtaacacttgc

SEQ ID NO: 29147 - DNA, 25 bp, Homo sapiens
gaagggctgtgcaccttgtactatt

SEQ ID NO: 29148 - DNA, 25 bp, Homo sapiens
gaatttcagctacacctagatagac

SEQ ID NO: 29149 - DNA, 25 bp, Homo sapiens
gatcagcactaagtcctgcattcct

SEQ ID NO: 29150 - DNA, 25 bp, Homo sapiens
gcattcctgttaaagccacttgggt

SEQ ID NO: 29151 - DNA, 25 bp, Homo sapiens
gctactgtaacacttgcctgtaatc

SEQ ID NO: 29152 - DNA, 25 bp, Homo sapiens
gtggtatgttgtgtgatgatcagca

SEQ ID NO: 29153 - DNA, 25 bp, Homo sapiens
gtggtattcatatgctatgtctcta

SEQ ID NO: 29154 - DNA, 25 bp, Homo sapiens
aagatggctgtctggggcaacaagt

SEQ ID NO: 29155 - DNA, 25 bp, Homo sapiens
aatctgaaggacttcatctcccgct

SEQ ID NO: 29156 - DNA, 25 bp, Homo sapiens
catctcccgctttgagggcttggag

SEQ ID NO: 29157 - DNA, 25 bp, Homo sapiens
catgcaggccctttgaagcctcagc

SEQ ID NO: 29158 - DNA, 25 bp, Homo sapiens
ctgtccccgtgttgcatgaaggagc

SEQ ID NO: 29159 - DNA, 25 bp, Homo sapiens
cttccttcctgcttagtggttgtgt

SEQ ID NO: 29160 - DNA, 25 bp, Homo sapiens
gcattgactggtttacaggccctgc

SEQ ID NO: 29161 - DNA, 25 bp, Homo sapiens
gggagtgaggagcccatactcagcc

SEQ ID NO: 29162 - DNA, 25 bp, Homo sapiens
tgtgtctgctttaaagcctgcctgg

SEQ ID NO: 29163 - DNA, 25 bp, Homo sapiens
ttactcccaagacttcattgtccct

SEQ ID NO: 29164 - DNA, 25 bp, Homo sapiens
ttggacgccttcccaaatctgaagg

SEQ ID NO: 29165 - DNA, 25 bp, Homo sapiens
actctgcctcaaacttgtgatgaac

SEQ ID NO: 29166 - DNA, 25 bp, Homo sapiens
agaagtcagcagcaaccatgtcttg

SEQ ID NO: 29167 - DNA, 25 bp, Homo sapiens
agttcccctttgctttaggagtgca

SEQ ID NO: 29168 - DNA, 25 bp, Homo sapiens
atcgctgagtacaatgctccttgca

SEQ ID NO: 29169 - DNA, 25 bp, Homo sapiens
cctccagacctccttgaaatacaat

SEQ ID NO: 29170 - DNA, 25 bp, Homo sapiens
gacggatgagtttgcaatcgctgag

SEQ ID NO: 29171 - DNA, 25 bp, Homo sapiens
gatctaaccatgtgagccggacaga

SEQ ID NO: 29172 - DNA, 25 bp, Homo sapiens
tcagacactgagcttgttcttcacg

SEQ ID NO: 29173 - DNA, 25 bp, Homo sapiens
tcttcacggttctgcaagatgtccc

SEQ ID NO: 29174 - DNA, 25 bp, Homo sapiens
tgtgatgaacccaaagcccacacca

SEQ ID NO: 29175 - DNA, 25 bp, Homo sapiens
ttcattcccctgaagccaacagtga

SEQ ID NO: 29176 - DNA, 25 bp, Homo sapiens
aaagtgtacctggatgcttctgggc

SEQ ID NO: 29177 - DNA, 25 bp, Homo sapiens
aacctccctattcctcagagaaaca

SEQ ID NO: 29178 - DNA, 25 bp, Homo sapiens
aggcgaggaaaacccatggctgctt

SEQ ID NO: 29179 - DNA, 25 bp, Homo sapiens
cactcgcttttctgatggttaccgc

SEQ ID NO: 29180 - DNA, 25 bp, Homo sapiens
gctgcgagggaaggaccacgtggtc

SEQ ID NO: 29181 - DNA, 25 bp, Homo sapiens
ggacttgagggactgcttactacta

SEQ ID NO: 29182 - DNA, 25 bp, Homo sapiens
gttgctaccgatagggactttgcca

SEQ ID NO: 29183 - DNA, 25 bp, Homo sapiens
tcagtacatcgagaatccacgcccg

SEQ ID NO: 29184 - DNA, 25 bp, Homo sapiens
tcctggtagggtctgcctgttggaa

SEQ ID NO: 29185 - DNA, 25 bp, Homo sapiens
ttctgggctccgtttggcaatagca

SEQ ID NO: 29186 - DNA, 25 bp, Homo sapiens
ttggctgatgtgcacagtctggctc

SEQ ID NO: 29187 - DNA, 25 bp, Homo sapiens
atgctgctctggtgattcttgtacc

SEQ ID NO: 29188 - DNA, 25 bp, Homo sapiens
caggcttctgcaaaagctcttcttc

SEQ ID NO: 29189 - DNA, 25 bp, Homo sapiens
cttctgcaaaagctcttcttcctga

SEQ ID NO: 29190 - DNA, 25 bp, Homo sapiens
gagtgaggtcacttccacttcaaac

SEQ ID NO: 29191 - DNA, 25 bp, Homo sapiens
gctctggtgattcttgtacctaatc

SEQ ID NO: 29192 - DNA, 25 bp, Homo sapiens
gctgcacctctgggggaatgagggg

SEQ ID NO: 29193 - DNA, 25 bp, Homo sapiens
ggtgtgctcaccaatgagtgaaagg

SEQ ID NO: 29194 - DNA, 25 bp, Homo sapiens
gtgaaagggatcgtgggtcagggac

SEQ ID NO: 29195 - DNA, 25 bp, Homo sapiens
gtgggtcagggacaccgagagagtg

SEQ ID NO: 29196 - DNA, 25 bp, Homo sapiens
tctggagagcctggtgcttcacgat

SEQ ID NO: 29197 - DNA, 25 bp, Homo sapiens
ttgtacctaatctggtgtgctcacc

SEQ ID NO: 29198 - DNA, 25 bp, Homo sapiens
ccacttctcccagtcagttgtggcc

SEQ ID NO: 29199 - DNA, 25 bp, Homo sapiens
ccgaagcggggagggccgctgtggc

SEQ ID NO: 29200 - DNA, 25 bp, Homo sapiens
cgcctcggtgtctatgcaaggccgc

SEQ ID NO: 29201 - DNA, 25 bp, Homo sapiens
cgcttcgccattgcggtattctttg

SEQ ID NO: 29202 - DNA, 25 bp, Homo sapiens
ctctccctgtgctgtgtggagtgga

SEQ ID NO: 29203 - DNA, 25 bp, Homo sapiens
gcagagttcttattttggggggagg

SEQ ID NO: 29204 - DNA, 25 bp, Homo sapiens
gccccacattgcacttctggggggt

SEQ ID NO: 29205 - DNA, 25 bp, Homo sapiens
ggcttctgtgtgctgctaactgtat

SEQ ID NO: 29206 - DNA, 25 bp, Homo sapiens
gtattctttgcggtattcttgtccc

SEQ ID NO: 29207 - DNA, 25 bp, Homo sapiens
tattgtgatgccttggtcagggccc

SEQ ID NO: 29208 - DNA, 25 bp, Homo sapiens
tgctgtgtggagtggacaccctgac

SEQ ID NO: 29209 - DNA, 25 bp, Homo sapiens
acatgaaaggctccttgctccaaca

SEQ ID NO: 29210 - DNA, 25 bp, Homo sapiens
agcacatgaaaggctccttgctcca

SEQ ID NO: 29211 - DNA, 25 bp, Homo sapiens
catgaatggaggacacttcagtagt

SEQ ID NO: 29212 - DNA, 25 bp, Homo sapiens
ctctatgcactatataataactggg

SEQ ID NO: 29213 - DNA, 25 bp, Homo sapiens
ctgaagattttgccaactcatgaat

SEQ ID NO: 29214 - DNA, 25 bp, Homo sapiens
cttgctccaacagtcactctgaaga

SEQ ID NO: 29215 - DNA, 25 bp, Homo sapiens
gacaggactaacacttaccagcctc

SEQ ID NO: 29216 - DNA, 25 bp, Homo sapiens
gccaactcatgaatggaggacactt

SEQ ID NO: 29217 - DNA, 25 bp, Homo sapiens
gctccaacagtcactctgaagattt

SEQ ID NO: 29218 - DNA, 25 bp, Homo sapiens
gtcttcgagggatagcacgaggtgg

SEQ ID NO: 29219 - DNA, 25 bp, Homo sapiens
tatataataactgggagcacatgaa

SEQ ID NO: 29220 - DNA, 25 bp, Homo sapiens
atgtcaagtttcctgttacactatg

SEQ ID NO: 29221 - DNA, 25 bp, Homo sapiens
gaaacatcagacatcattgcgtgta

SEQ ID NO: 29222 - DNA, 25 bp, Homo sapiens
gagtgagtgctgtgaacggtgtgaa

SEQ ID NO: 29223 - DNA, 25 bp, Homo sapiens
gcgtgtacagaccttttgcatgggt

SEQ ID NO: 29224 - DNA, 25 bp, Homo sapiens
gtcttcatctctgcaataaactaaa

SEQ ID NO: 29225 - DNA, 25 bp, Homo sapiens
gtgtttacactgttcatcgtgcctg

SEQ ID NO: 29226 - DNA, 25 bp, Homo sapiens
gttcatcgtgcctgttaatgtagtt

SEQ ID NO: 29227 - DNA, 25 bp, Homo sapiens
gtttaatgtagtcctagtgctcttg

SEQ ID NO: 29228 - DNA, 25 bp, Homo sapiens
tagtgctcttgaaatggtgcccctt

SEQ ID NO: 29229 - DNA, 25 bp, Homo sapiens
tgtctgccctgttaaacttggtgcc

SEQ ID NO: 29230 - DNA, 25 bp, Homo sapiens
ttggtgcccattaacagtgtttaca

SEQ ID NO: 29231 - DNA, 25 bp, Homo sapiens
acactcggtcatgtgctcagacaac

SEQ ID NO: 29232 - DNA, 25 bp, Homo sapiens
actcaagaccaagaccggatcccag

SEQ ID NO: 29233 - DNA, 25 bp, Homo sapiens
actggccagcagttatttcgtcact

SEQ ID NO: 29234 - DNA, 25 bp, Homo sapiens
caaggaatttatgctctgccgctgg

SEQ ID NO: 29235 - DNA, 25 bp, Homo sapiens
cagatcgacctttaccggagaatcc

SEQ ID NO: 29236 - DNA, 25 bp, Homo sapiens
catggcagccgcttttatttctgga

SEQ ID NO: 29237 - DNA, 25 bp, Homo sapiens
gaaaacgcccatgcggtttgcatcg

SEQ ID NO: 29238 - DNA, 25 bp, Homo sapiens
gatcgagggagatctgcagcctgcc

SEQ ID NO: 29239 - DNA, 25 bp, Homo sapiens
ggagaatccctatcactcaagacca

SEQ ID NO: 29240 - DNA, 25 bp, Homo sapiens
taaagatgggtccgtggcccacact

SEQ ID NO: 29241 - DNA, 25 bp, Homo sapiens
tgcggcccatcactatggagctcaa

SEQ ID NO: 29242 - DNA, 25 bp, Homo sapiens
ataagcgcacaaacagcactgtctg

SEQ ID NO: 29243 - DNA, 25 bp, Homo sapiens
gaaccaactgacattctatcgtgtt

SEQ ID NO: 29244 - DNA, 25 bp, Homo sapiens
gcactgtctgtcggtaatcggtact

SEQ ID NO: 29245 - DNA, 25 bp, Homo sapiens
gcccaggcgttgctaggattgcatc

SEQ ID NO: 29246 - DNA, 25 bp, Homo sapiens
gctgggttgccacacttgggaaagc

SEQ ID NO: 29247 - DNA, 25 bp, Homo sapiens
ggattgcatcagttttcctgtttgc

SEQ ID NO: 29248 - DNA, 25 bp, Homo sapiens
gggttccactgttgttgtatgtctt

SEQ ID NO: 29249 - DNA, 25 bp, Homo sapiens
tcctccttgctctgaaacttcagcg

SEQ ID NO: 29250 - DNA, 25 bp, Homo sapiens
tcgccagcttgtacgtagcttgcca

SEQ ID NO: 29251 - DNA, 25 bp, Homo sapiens
tgaagtatttcgaatctcctccttg

SEQ ID NO: 29252 - DNA, 25 bp, Homo sapiens
tgtatagtagtcctatggcaccccc

SEQ ID NO: 29253 - DNA, 25 bp, Homo sapiens
aactgaggcccacgtactggggctg

SEQ ID NO: 29254 - DNA, 25 bp, Homo sapiens
acccccattttaaccttcagcatgg

SEQ ID NO: 29255 - DNA, 25 bp, Homo sapiens
ccagacttccatttcttcacaagga

SEQ ID NO: 29256 - DNA, 25 bp, Homo sapiens
ccttagcttcaccctggctagaaat

SEQ ID NO: 29257 - DNA, 25 bp, Homo sapiens
cggaggtggacattgcatctgggat

SEQ ID NO: 29258 - DNA, 25 bp, Homo sapiens
ctatgcccagaatattccaacccgg

SEQ ID NO: 29259 - DNA, 25 bp, Homo sapiens
gaaccaaggtgctgatcctaccacc

SEQ ID NO: 29260 - DNA, 25 bp, Homo sapiens
gactggcgtgatgcctggaaccaag

SEQ ID NO: 29261 - DNA, 25 bp, Homo sapiens
gggctggtgaatcacgctgtggccc

SEQ ID NO: 29262 - DNA, 25 bp, Homo sapiens
gtggccagattgccttcatcatttc

SEQ ID NO: 29263 - DNA, 25 bp, Homo sapiens
ttcacgggccgacgactgagtggaa

SEQ ID NO: 29264 - DNA, 25 bp, Homo sapiens
aaacgctgccagatcatcatctttc

SEQ ID NO: 29265 - DNA, 25 bp, Homo sapiens
actgccgggcatttattatactact

SEQ ID NO: 29266 - DNA, 25 bp, Homo sapiens
atccccttcactgacaagttctgtg

SEQ ID NO: 29267 - DNA, 25 bp, Homo sapiens
atctttcaggtggtcttcctgggcc

SEQ ID NO: 29268 - DNA, 25 bp, Homo sapiens
cacatctcggggttcatcagtggcc

SEQ ID NO: 29269 - DNA, 25 bp, Homo sapiens
cttgacgaccacctcatgtggccaa

SEQ ID NO: 29270 - DNA, 25 bp, Homo sapiens
gaagtacgaactggacgctcagctc

SEQ ID NO: 29271 - DNA, 25 bp, Homo sapiens
ggcctgtttcctgaacacagacctc

SEQ ID NO: 29272 - DNA, 25 bp, Homo sapiens
tacaggagtcacctgctccatgtgg

SEQ ID NO: 29273 - DNA, 25 bp, Homo sapiens
tacttcctgtcataaccttctaact

SEQ ID NO: 29274 - DNA, 25 bp, Homo sapiens
tggattgacaactttgcccacatct

SEQ ID NO: 29275 - DNA, 25 bp, Homo sapiens
agcactgggccaggctttgtagctc

SEQ ID NO: 29276 - DNA, 25 bp, Homo sapiens
agcgccgcaagtcgagtttggtgag

SEQ ID NO: 29277 - DNA, 25 bp, Homo sapiens
ccctgggactcgccaaactgataag

SEQ ID NO: 29278 - DNA, 25 bp, Homo sapiens
gaactttagtccacgaggctgtcac

SEQ ID NO: 29279 - DNA, 25 bp, Homo sapiens
gatgctctccactgctgtggaggga

SEQ ID NO: 29280 - DNA, 25 bp, Homo sapiens
gtgccccaaacactgggatgctctc

SEQ ID NO: 29281 - DNA, 25 bp, Homo sapiens
tagctagtcccgcgacattgagctc

SEQ ID NO: 29282 - DNA, 25 bp, Homo sapiens
tatgttggtgtagctagtcccgcga

SEQ ID NO: 29283 - DNA, 25 bp, Homo sapiens
tggatgattattctgccctgggact

SEQ ID NO: 29284 - DNA, 25 bp, Homo sapiens
tttattgcaaactagctcctttctc

SEQ ID NO: 29285 - DNA, 25 bp, Homo sapiens
tttggtgtattgtccccttagtaca

SEQ ID NO: 29286 - DNA, 25 bp, Homo sapiens
aacatcctgatgtgcttttggtatc

SEQ ID NO: 29287 - DNA, 25 bp, Homo sapiens
caacaggaggcatctccatttacta

SEQ ID NO: 29288 - DNA, 25 bp, Homo sapiens
gaggagccagtgtattccaggttaa

SEQ ID NO: 29289 - DNA, 25 bp, Homo sapiens
gagtaaagcctgactggaccattgc

SEQ ID NO: 29290 - DNA, 25 bp, Homo sapiens
gagtttcagagggagttcacacaag

SEQ ID NO: 29291 - DNA, 25 bp, Homo sapiens
ggaccattgcacggattgaacactc

SEQ ID NO: 29292 - DNA, 25 bp, Homo sapiens
ggggtcatttgatcttcacttaatc

SEQ ID NO: 29293 - DNA, 25 bp, Homo sapiens
tactccttgcagtatattggcatga

SEQ ID NO: 29294 - DNA, 25 bp, Homo sapiens
tccacagattgttatcaccttcttt

SEQ ID NO: 29295 - DNA, 25 bp, Homo sapiens
tgccaacatccccagtgaaacttta

SEQ ID NO: 29296 - DNA, 25 bp, Homo sapiens
tggtatctaaccagtgccaacatcc

SEQ ID NO: 29297 - DNA, 25 bp, Homo sapiens
caggcatctaggaagacccagcacc

SEQ ID NO: 29298 - DNA, 25 bp, Homo sapiens
ccatccccatagccatgtttacatg

SEQ ID NO: 29299 - DNA, 25 bp, Homo sapiens
cccctgatcccaaatctgtttacac

SEQ ID NO: 29300 - DNA, 25 bp, Homo sapiens
gccagagtttgggaccaggacctcc

SEQ ID NO: 29301 - DNA, 25 bp, Homo sapiens
gcccagcagagcctaagcactgtgc

SEQ ID NO: 29302 - DNA, 25 bp, Homo sapiens
ggagatagattgtctcccttgcctc

SEQ ID NO: 29303 - DNA, 25 bp, Homo sapiens
ggaggaggcttcagccatcagcaat

SEQ ID NO: 29304 - DNA, 25 bp, Homo sapiens
gggctgggtgactgggtctagcccc

SEQ ID NO: 29305 - DNA, 25 bp, Homo sapiens
tcctgcttttccatacttaactgtg

SEQ ID NO: 29306 - DNA, 25 bp, Homo sapiens
tctgtttacacatcaatctgcctca

SEQ ID NO: 29307 - DNA, 25 bp, Homo sapiens
ttaactgtggcctcagcatggggta

SEQ ID NO: 29308 - DNA, 25 bp, Homo sapiens
aacattctgctctgaacgaaaagta

SEQ ID NO: 29309 - DNA, 25 bp, Homo sapiens
attcatattctactttcaataaagc

SEQ ID NO: 29310 - DNA, 25 bp, Homo sapiens
ccaatgcctgtctttgattcatatt

SEQ ID NO: 29311 - DNA, 25 bp, Homo sapiens
gagacataacctgcttaccaatgcc

SEQ ID NO: 29312 - DNA, 25 bp, Homo sapiens
gagatttatagtcgtgggaggggaa

SEQ ID NO: 29313 - DNA, 25 bp, Homo sapiens
gatgcgttggtccataaaggattgt

SEQ ID NO: 29314 - DNA, 25 bp, Homo sapiens
gatgggacaacattctgctctgaac

SEQ ID NO: 29315 - DNA, 25 bp, Homo sapiens
gcttaccaatgcctgtctttgattc

SEQ ID NO: 29316 - DNA, 25 bp, Homo sapiens
gttatatttccttgctcgagtttca

SEQ ID NO: 29317 - DNA, 25 bp, Homo sapiens
gtttcataccagatgcgttggtcca

SEQ ID NO: 29318 - DNA, 25 bp, Homo sapiens
ttccttgctcgagtttcataccaga

SEQ ID NO: 29319 - DNA, 25 bp, Homo sapiens
aagaggggaagtctcttcctgcctc

SEQ ID NO: 29320 - DNA, 25 bp, Homo sapiens
acaccccccaccatggtgggcttgt

SEQ ID NO: 29321 - DNA, 25 bp, Homo sapiens
atccaaatggctgcttttgtctccc

SEQ ID NO: 29322 - DNA, 25 bp, Homo sapiens
cacttcacagctggagacaccggag

SEQ ID NO: 29323 - DNA, 25 bp, Homo sapiens
catgggctacagtgtctggccttgg

SEQ ID NO: 29324 - DNA, 25 bp, Homo sapiens
ctaccctcctctagaaggctgagta

SEQ ID NO: 29325 - DNA, 25 bp, Homo sapiens
gatactactagatcacttgtcctct

SEQ ID NO: 29326 - DNA, 25 bp, Homo sapiens
gccagcagagcatgttggacacccc

SEQ ID NO: 29327 - DNA, 25 bp, Homo sapiens
ggatttgactcctccaaggttttgt

SEQ ID NO: 29328 - DNA, 25 bp, Homo sapiens
gtattgatactggtcccacttcaca

SEQ ID NO: 29329 - DNA, 25 bp, Homo sapiens
tagagaatgccctcagctcttagct

SEQ ID NO: 29330 - DNA, 25 bp, Homo sapiens
acacttgaccaattcagctgctggc

SEQ ID NO: 29331 - DNA, 25 bp, Homo sapiens
agactctattttctcccaaagacac

SEQ ID NO: 29332 - DNA, 25 bp, Homo sapiens
catgcctccctctcattggaggagc

SEQ ID NO: 29333 - DNA, 25 bp, Homo sapiens
gagaagacgccacagatttccttcc

SEQ ID NO: 29334 - DNA, 25 bp, Homo sapiens
gattgtcttaagtagcagcccagcc

SEQ ID NO: 29335 - DNA, 25 bp, Homo sapiens
gccctaacgggccataacacttgac

SEQ ID NO: 29336 - DNA, 25 bp, Homo sapiens
ggaggagagctggcattcctccagg

SEQ ID NO: 29337 - DNA, 25 bp, Homo sapiens
ggcaaatggcgactctatactctcc

SEQ ID NO: 29338 - DNA, 25 bp, Homo sapiens
gttcgagttttcttatcttgtgttt

SEQ ID NO: 29339 - DNA, 25 bp, Homo sapiens
tctcgctttcaccctgactaaagat

SEQ ID NO: 29340 - DNA, 25 bp, Homo sapiens
ttttccgtactgcagagcttacaca

SEQ ID NO: 29341 - DNA, 25 bp, Homo sapiens
aagccgtatgatgatgttcccgatt

SEQ ID NO: 29342 - DNA, 25 bp, Homo sapiens
aagtcctatcagccatggaaacacc

SEQ ID NO: 29343 - DNA, 25 bp, Homo sapiens
ccgaggaaggagtggctgggggtct

SEQ ID NO: 29344 - DNA, 25 bp, Homo sapiens
cgccatgtgatcctctctgagatca

SEQ ID NO: 29345 - DNA, 25 bp, Homo sapiens
cttcggacacaatctactcctacgt

SEQ ID NO: 29346 - DNA, 25 bp, Homo sapiens
ggactgagcgtccgcagaggtgacc

SEQ ID NO: 29347 - DNA, 25 bp, Homo sapiens
gtagggaagctgagtgtgtcgctcc

SEQ ID NO: 29348 - DNA, 25 bp, Homo sapiens
gtgaccacgcagtctgtgatggggt

SEQ ID NO: 29349 - DNA, 25 bp, Homo sapiens
gttcccgatttctctgttggtcgga

SEQ ID NO: 29350 - DNA, 25 bp, Homo sapiens
tgagatcaaggaagccgtcgctgcc

SEQ ID NO: 29351 - DNA, 25 bp, Homo sapiens
ttccggtcactgttgccaaactata

SEQ ID NO: 29352 - DNA, 25 bp, Homo sapiens
agacaccttccgagtgtgtgctcta

SEQ ID NO: 29353 - DNA, 25 bp, Homo sapiens
gacacctcctgagtgtgtctgctca

SEQ ID NO: 29354 - DNA, 25 bp, Homo sapiens
gatgataatctcaagacacctcccg

SEQ ID NO: 29355 - DNA, 25 bp, Homo sapiens
taatctcaagacacctgccgagtgc

SEQ ID NO: 29356 - DNA, 25 bp, Homo sapiens
aatttgtgtcacttactatttttgt

SEQ ID NO: 29357 - DNA, 25 bp, Homo sapiens
acaatgtagcatatttgattttctt

SEQ ID NO: 29358 - DNA, 25 bp, Homo sapiens
agatactgcgaataggccctcaaac

SEQ ID NO: 29359 - DNA, 25 bp, Homo sapiens
atgccattattgattcttgatattc

SEQ ID NO: 29360 - DNA, 25 bp, Homo sapiens
atgtacctttattttccagtatgcc

SEQ ID NO: 29361 - DNA, 25 bp, Homo sapiens
cactattattgggtttgttttatgc

SEQ ID NO: 29362 - DNA, 25 bp, Homo sapiens
gaagatttagttttcatatcgtata

SEQ ID NO: 29363 - DNA, 25 bp, Homo sapiens
gtactgttatctaagctactgtgtt

SEQ ID NO: 29364 - DNA, 25 bp, Homo sapiens
ttgtgttgtttagctttcatttgct

SEQ ID NO: 29365 - DNA, 25 bp, Homo sapiens
tttccagtatgcctacattttgtat

SEQ ID NO: 29366 - DNA, 25 bp, Homo sapiens
tttgccagttttaaggacatatttt

SEQ ID NO: 29367 - DNA, 25 bp, Homo sapiens
aaacgcacagtctgttctgcagcaa

SEQ ID NO: 29368 - DNA, 25 bp, Homo sapiens
aaagtcattttgtatctgccaagtg

SEQ ID NO: 29369 - DNA, 25 bp, Homo sapiens
atctgccaagtgtggtaccttcctt

SEQ ID NO: 29370 - DNA, 25 bp, Homo sapiens
ctgcagcaacaacgggattcaatca

SEQ ID NO: 29371 - DNA, 25 bp, Homo sapiens
gaacttgtgttgtactctgtagaaa

SEQ ID NO: 29372 - DNA, 25 bp, Homo sapiens
gtcccaatggggaacctaaatctgt

SEQ ID NO: 29373 - DNA, 25 bp, Homo sapiens
gttttaattgcacagacacatggac

SEQ ID NO: 29374 - DNA, 25 bp, Homo sapiens
tcaactcagtcgtgattcagccgta

SEQ ID NO: 29375 - DNA, 25 bp, Homo sapiens
tcagccgtagaaatgcttttccttt

SEQ ID NO: 29376 - DNA, 25 bp, Homo sapiens
ttatcttgtttgagcttttcctttc

SEQ ID NO: 29377 - DNA, 25 bp, Homo sapiens
ttgccactatgaccaaacgcacagt

SEQ ID NO: 29378 - DNA, 25 bp, Homo sapiens
aagctctttgagggcagtctgtcag

SEQ ID NO: 29379 - DNA, 25 bp, Homo sapiens
agatttatctttgtatcttccccag

SEQ ID NO: 29380 - DNA, 25 bp, Homo sapiens
agttacacttaaaatatcttctcca

SEQ ID NO: 29381 - DNA, 25 bp, Homo sapiens
caccgtgcccggctgaagatttttc

SEQ ID NO: 29382 - DNA, 25 bp, Homo sapiens
cgcctagtgtagtgccttgcacata

SEQ ID NO: 29383 - DNA, 25 bp, Homo sapiens
gaagatttttcttaattgcaataaa

SEQ ID NO: 29384 - DNA, 25 bp, Homo sapiens
gactttcagatttatgctttttacg

SEQ ID NO: 29385 - DNA, 25 bp, Homo sapiens
gagactgtatgctcctatactagac

SEQ ID NO: 29386 - DNA, 25 bp, Homo sapiens
gctttttacgtgaagctgctaaact

SEQ ID NO: 29387 - DNA, 25 bp, Homo sapiens
tatgctcctatactagactgtaagc

SEQ ID NO: 29388 - DNA, 25 bp, Homo sapiens
tcttctccagagactgtatgctcct

SEQ ID NO: 29389 - DNA, 25 bp, Homo sapiens
aatgctaatgttttccaaggcttaa

SEQ ID NO: 29390 - DNA, 25 bp, Homo sapiens
agcggacatgggtcaatttctgttt

SEQ ID NO: 29391 - DNA, 25 bp, Homo sapiens
ctgaatgactgtaggcaagccgttt

SEQ ID NO: 29392 - DNA, 25 bp, Homo sapiens
gctttgagacctaatttctccatct

SEQ ID NO: 29393 - DNA, 25 bp, Homo sapiens
gggctacacttttgaatttcttggg

SEQ ID NO: 29394 - DNA, 25 bp, Homo sapiens
gttcttaacctgggctacacttttg

SEQ ID NO: 29395 - DNA, 25 bp, Homo sapiens
taattatacttgccctacctgatca

SEQ ID NO: 29396 - DNA, 25 bp, Homo sapiens
tattttcagcttaggtttttaccag

SEQ ID NO: 29397 - DNA, 25 bp, Homo sapiens
tctgtaccattgttatgtagtccca

SEQ ID NO: 29398 - DNA, 25 bp, Homo sapiens
ttctccatctgttagaggtggtgat

SEQ ID NO: 29399 - DNA, 25 bp, Homo sapiens
ttttctcattgatattgctctacaa

SEQ ID NO: 29400 - DNA, 25 bp, Homo sapiens
agcagagagggagccgttcatgtca

SEQ ID NO: 29401 - DNA, 25 bp, Homo sapiens
atctccccccaaattttgtgtagct

SEQ ID NO: 29402 - DNA, 25 bp, Homo sapiens
cactgccagaaaagccttacccatt

SEQ ID NO: 29403 - DNA, 25 bp, Homo sapiens
gaatcattattcatgacccctctgc

SEQ ID NO: 29404 - DNA, 25 bp, Homo sapiens
gacccctctgcaaatgtgtcagtct

SEQ ID NO: 29405 - DNA, 25 bp, Homo sapiens
gtcacttattctttgcctgattcag

SEQ ID NO: 29406 - DNA, 25 bp, Homo sapiens
gtctccaaagagagtatctcccccc

SEQ ID NO: 29407 - DNA, 25 bp, Homo sapiens
gttcatgtcagagactcactgccag

SEQ ID NO: 29408 - DNA, 25 bp, Homo sapiens
tgtgcatgcctgagttgattccgaa

SEQ ID NO: 29409 - DNA, 25 bp, Homo sapiens
ttgagaccgcaactgcttgcactga

SEQ ID NO: 29410 - DNA, 25 bp, Homo sapiens
ttttagttggtctggtgttcgggct

SEQ ID NO: 29411 - DNA, 25 bp, Homo sapiens
aaaagatggtgtggtttctcccttg

SEQ ID NO: 29412 - DNA, 25 bp, Homo sapiens
aatgccactttacaaatacttttct

SEQ ID NO: 29413 - DNA, 25 bp, Homo sapiens
aatgcgttgtcttctgcgtgatgtg

SEQ ID NO: 29414 - DNA, 25 bp, Homo sapiens
caccttcaaggtcaaatgcctgcct

SEQ ID NO: 29415 - DNA, 25 bp, Homo sapiens
gaagggagcattgtagcctgctgta

SEQ ID NO: 29416 - DNA, 25 bp, Homo sapiens
gggcaagatgtgtgtcgactatgtt

SEQ ID NO: 29417 - DNA, 25 bp, Homo sapiens
gtagcctgctgtagaccattccagc

SEQ ID NO: 29418 - DNA, 25 bp, Homo sapiens
gtggcccttagcgaaatgcgttgtc

SEQ ID NO: 29419 - DNA, 25 bp, Homo sapiens
taacaatactgaaaagccctcccct

SEQ ID NO: 29420 - DNA, 25 bp, Homo sapiens
tccccttgccaggccgaggaaataa

SEQ ID NO: 29421 - DNA, 25 bp, Homo sapiens
tgtggaattcgcgcctgtattttaa

SEQ ID NO: 29422 - DNA, 25 bp, Homo sapiens
aaacaatgtcactctggctaacaaa

SEQ ID NO: 29423 - DNA, 25 bp, Homo sapiens
aacaaactcaaaaccatgcttccaa

SEQ ID NO: 29424 - DNA, 25 bp, Homo sapiens
actcaaagactgtcctggtttcgtg

SEQ ID NO: 29425 - DNA, 25 bp, Homo sapiens
agtgaaatccccggaatctgccatt

SEQ ID NO: 29426 - DNA, 25 bp, Homo sapiens
ctccccatggagaacctatcaagat

SEQ ID NO: 29427 - DNA, 25 bp, Homo sapiens
ctgatgaagttatgtctccccatgg

SEQ ID NO: 29428 - DNA, 25 bp, Homo sapiens
gtcacaatctttctcctgtttaaca

SEQ ID NO: 29429 - DNA, 25 bp, Homo sapiens
tcgtgtttacccctcgatcaaggga

SEQ ID NO: 29430 - DNA, 25 bp, Homo sapiens
tggagttaaaatgccccgttactgt

SEQ ID NO: 29431 - DNA, 25 bp, Homo sapiens
ttccaccaaacttccctagtgaaat

SEQ ID NO: 29432 - DNA, 25 bp, Homo sapiens
ttttgctggcgtcgttggagttaaa

SEQ ID NO: 29433 - DNA, 25 bp, Homo sapiens
actaggggagcctggtatacatgcg

SEQ ID NO: 29434 - DNA, 25 bp, Homo sapiens
atttcatgcactttaaagtcctgtg

SEQ ID NO: 29435 - DNA, 25 bp, Homo sapiens
caagctggactgtgggttccaaatt

SEQ ID NO: 29436 - DNA, 25 bp, Homo sapiens
cactgtggtcagtctcctgtcccag

SEQ ID NO: 29437 - DNA, 25 bp, Homo sapiens
catgcggcttcattgccaataaatt

SEQ ID NO: 29438 - DNA, 25 bp, Homo sapiens
ccacccttccttcagtgagcagaat

SEQ ID NO: 29439 - DNA, 25 bp, Homo sapiens
gccgtggtttgtattcattgtgcat

SEQ ID NO: 29440 - DNA, 25 bp, Homo sapiens
gcctggtatacatgcggcttcattg

SEQ ID NO: 29441 - DNA, 25 bp, Homo sapiens
gcttcagttcatgaatactcctgtt

SEQ ID NO: 29442 - DNA, 25 bp, Homo sapiens
ggttccaaattactcatagaggaga

SEQ ID NO: 29443 - DNA, 25 bp, Homo sapiens
gtggcttgtgacctcttaataaagt

SEQ ID NO: 29444 - DNA, 25 bp, Homo sapiens
gttccaaattactcatagaggagaa

SEQ ID NO: 29445 - DNA, 25 bp, Homo sapiens
tatacatgcggcttcattgccaata

SEQ ID NO: 29446 - DNA, 25 bp, Homo sapiens
tattcattgtgcatatcagggatac

SEQ ID NO: 29447 - DNA, 25 bp, Homo sapiens
tcctgtcccagcttcagttcatgaa

SEQ ID NO: 29448 - DNA, 25 bp, Homo sapiens
ttcagtgagcagaatcactgtggtc

SEQ ID NO: 29449 - DNA, 25 bp, Homo sapiens
accccatcatctgtggacactggag

SEQ ID NO: 29450 - DNA, 25 bp, Homo sapiens
agacgagtgctgagccaagaacctc

SEQ ID NO: 29451 - DNA, 25 bp, Homo sapiens
agccaagaacctcctagaggctgtc

SEQ ID NO: 29452 - DNA, 25 bp, Homo sapiens
agctgcaggcatcagagaaccagcc

SEQ ID NO: 29453 - DNA, 25 bp, Homo sapiens
aggcatcagagaaccagccctgctc

SEQ ID NO: 29454 - DNA, 25 bp, Homo sapiens
agggaatgtgactctcccaggcccc

SEQ ID NO: 29455 - DNA, 25 bp, Homo sapiens
atctgtggacactggagtctggaat

SEQ ID NO: 29456 - DNA, 25 bp, Homo sapiens
caccccatcatctgtggacactgga

SEQ ID NO: 29457 - DNA, 25 bp, Homo sapiens
cccacctgacgtcttgctgcagagt

SEQ ID NO: 29458 - DNA, 25 bp, Homo sapiens
gcagagtctgacactggattccccc

SEQ ID NO: 29459 - DNA, 25 bp, Homo sapiens
gcccagcctgggacaaggctccgag

SEQ ID NO: 29460 - DNA, 25 bp, Homo sapiens
ggacactggagtctggaataaatgc

SEQ ID NO: 29461 - DNA, 25 bp, Homo sapiens
ggcatcagagaaccagccctgctca

SEQ ID NO: 29462 - DNA, 25 bp, Homo sapiens
tgcagagtctgacactggattcccc

SEQ ID NO: 29463 - DNA, 25 bp, Homo sapiens
tgccggcaaggcagggacccacagt

SEQ ID NO: 29464 - DNA, 25 bp, Homo sapiens
tggccggagctatttttacctcccg

SEQ ID NO: 29465 - DNA, 25 bp, Homo sapiens
acgggctgtccgtgtgcctcctgtg

SEQ ID NO: 29466 - DNA, 25 bp, Homo sapiens
ctcccagtggcctggcttgtcggag

SEQ ID NO: 29467 - DNA, 25 bp, Homo sapiens
ctgaaagccagcaaagcctccagca

SEQ ID NO: 29468 - DNA, 25 bp, Homo sapiens
cttgtcggagcaagtttcatcagcc

SEQ ID NO: 29469 - DNA, 25 bp, Homo sapiens
gacaagtcttgctgtgctttatttg

SEQ ID NO: 29470 - DNA, 25 bp, Homo sapiens
gcagacaagtcttgctgtgctttat

SEQ ID NO: 29471 - DNA, 25 bp, Homo sapiens
gccagcaaagcctccagcatctttt

SEQ ID NO: 29472 - DNA, 25 bp, Homo sapiens
gcctcctgtgtgtctgcagacaagt

SEQ ID NO: 29473 - DNA, 25 bp, Homo sapiens
ggagcaagtttcatcagccctaggg

SEQ ID NO: 29474 - DNA, 25 bp, Homo sapiens
gtctgcagacaagtcttgctgtgct

SEQ ID NO: 29475 - DNA, 25 bp, Homo sapiens
gtgtgcctcctgtgtgtctgcagac

SEQ ID NO: 29476 - DNA, 25 bp, Homo sapiens
tcctgtgtgtctgcagacaagtctt

SEQ ID NO: 29477 - DNA, 25 bp, Homo sapiens
tgcagacaagtcttgctgtgcttta

SEQ ID NO: 29478 - DNA, 25 bp, Homo sapiens
tggcttgtcggagcaagtttcatca

SEQ ID NO: 29479 - DNA, 25 bp, Homo sapiens
tgtccgtgtgcctcctgtgtgtctg

SEQ ID NO: 29480 - DNA, 25 bp, Homo sapiens
tgtgtctgcagacaagtcttgctgt

SEQ ID NO: 29481 - DNA, 25 bp, Homo sapiens
agctttgggccaaaagcaggcgttg

SEQ ID NO: 29482 - DNA, 25 bp, Homo sapiens
cacccctgggcatcatgtgtgtggg

SEQ ID NO: 29483 - DNA, 25 bp, Homo sapiens
caggtggctgagcaggagctcccaa

SEQ ID NO: 29484 - DNA, 25 bp, Homo sapiens
cctcaagtttggagccgtttccgtg

SEQ ID NO: 29485 - DNA, 25 bp, Homo sapiens
ctggtgaccccagacccagaattct

SEQ ID NO: 29486 - DNA, 25 bp, Homo sapiens
cttatgctgccatgcactgccctgg

SEQ ID NO: 29487 - DNA, 25 bp, Homo sapiens
gacccagaattctcagggctctacc

SEQ ID NO: 29488 - DNA, 25 bp, Homo sapiens
gaccccagacccagaattctcaggg

SEQ ID NO: 29489 - DNA, 25 bp, Homo sapiens
ggccaccgctgtcagggattgccca

SEQ ID NO: 29490 - DNA, 25 bp, Homo sapiens
gtttctgaaggcagtcgatctgcag

SEQ ID NO: 29491 - DNA, 25 bp, Homo sapiens
tatgctgccatgcactgccctggct

SEQ ID NO: 29492 - DNA, 25 bp, Homo sapiens
tgcaggccaggctgccactccggga

SEQ ID NO: 29493 - DNA, 25 bp, Homo sapiens
tggaaggcagagctttgggccaaaa

SEQ ID NO: 29494 - DNA, 25 bp, Homo sapiens
tgtgcctcgctgctggggctctgca

SEQ ID NO: 29495 - DNA, 25 bp, Homo sapiens
tgtgggagctggtgaccccagaccc

SEQ ID NO: 29496 - DNA, 25 bp, Homo sapiens
tttcctggtcctaggtggccagtgg

SEQ ID NO: 29497 - DNA, 25 bp, Homo sapiens
aacttgtaaatacaccacctcactc

SEQ ID NO: 29498 - DNA, 25 bp, Homo sapiens
actagttttgtgccagccgtgatgc

SEQ ID NO: 29499 - DNA, 25 bp, Homo sapiens
actcctgccctgttgtgtatagatg

SEQ ID NO: 29500 - DNA, 25 bp, Homo sapiens
atacattctttatcttgacattcaa

SEQ ID NO: 29501 - DNA, 25 bp, Homo sapiens
atcagtgtcctcttgctcaaaaatc

SEQ ID NO: 29502 - DNA, 25 bp, Homo sapiens
ctcactcctgttacttacctaaaca

SEQ ID NO: 29503 - DNA, 25 bp, Homo sapiens
cttagacttcgactcaggatccagt

SEQ ID NO: 29504 - DNA, 25 bp, Homo sapiens
gacattcaaggcatttctatcacat

SEQ ID NO: 29505 - DNA, 25 bp, Homo sapiens
gagcctgcaaactcactgctcaaga

SEQ ID NO: 29506 - DNA, 25 bp, Homo sapiens
tgtttgatccctgttacccagagaa

SEQ ID NO: 29507 - DNA, 25 bp, Homo sapiens
ttacacgtacctctcatcagtgtcc

SEQ ID NO: 29508 - DNA, 25 bp, Homo sapiens
acccatttgtgcattgagttttctt

SEQ ID NO: 29509 - DNA, 25 bp, Homo sapiens
agcacttttatactaattaacccat

SEQ ID NO: 29510 - DNA, 25 bp, Homo sapiens
gagcagtcagcattgcacctgctat

SEQ ID NO: 29511 - DNA, 25 bp, Homo sapiens
gatacccagtatgcttaacgtgaaa

SEQ ID NO: 29512 - DNA, 25 bp, Homo sapiens
gatggcagttcttatctgcatcact

SEQ ID NO: 29513 - DNA, 25 bp, Homo sapiens
gcattgcacctgctatggagaaggg

SEQ ID NO: 29514 - DNA, 25 bp, Homo sapiens
gctcactggccagagacattgatgg

SEQ ID NO: 29515 - DNA, 25 bp, Homo sapiens
ggaagtttgttgtagtatgcctcaa

SEQ ID NO: 29516 - DNA, 25 bp, Homo sapiens
gtaaatacttggacagaggttgctg

SEQ ID NO: 29517 - DNA, 25 bp, Homo sapiens
gttttcaatttgctcactggccaga

SEQ ID NO: 29518 - DNA, 25 bp, Homo sapiens
tggtaacttttcaaacagcccttag

SEQ ID NO: 29519 - DNA, 25 bp, Homo sapiens
acctgtctgccagccagaaggcact

SEQ ID NO: 29520 - DNA, 25 bp, Homo sapiens
agaagtgagagatgctggcctgcgc

SEQ ID NO: 29521 - DNA, 25 bp, Homo sapiens
catccagggcttagcctccaagtgg

SEQ ID NO: 29522 - DNA, 25 bp, Homo sapiens
cgcgctcgttatcatgtggcagaag

SEQ ID NO: 29523 - DNA, 25 bp, Homo sapiens
gcaatttccacctctgtgtgtgtac

SEQ ID NO: 29524 - DNA, 25 bp, Homo sapiens
gcagaagcactatgtgtacggcccc

SEQ ID NO: 29525 - DNA, 25 bp, Homo sapiens
gccatgcaactccatgcctatttac

SEQ ID NO: 29526 - DNA, 25 bp, Homo sapiens
gtgccatgttcttcatcggtttcac

SEQ ID NO: 29527 - DNA, 25 bp, Homo sapiens
gtggaagacggttgtgggcggtgcc

SEQ ID NO: 29528 - DNA, 25 bp, Homo sapiens
tcctggagcagcctctccatggatg

SEQ ID NO: 29529 - DNA, 25 bp, Homo sapiens
tcgctcccagcttatatggatcggc

SEQ ID NO: 29530 - DNA, 25 bp, Homo sapiens
aaatcccagcaattctgtacttgtg

SEQ ID NO: 29531 - DNA, 25 bp, Homo sapiens
aagaatattccccaaagcactgaga

SEQ ID NO: 29532 - DNA, 25 bp, Homo sapiens
caaagactcggcgtgttgtccattg

SEQ ID NO: 29533 - DNA, 25 bp, Homo sapiens
gaatatagtacacgaccttcctgca

SEQ ID NO: 29534 - DNA, 25 bp, Homo sapiens
gacatgttaccgattataaaacctc

SEQ ID NO: 29535 - DNA, 25 bp, Homo sapiens
gataactattctcacatgtcgacat

SEQ ID NO: 29536 - DNA, 25 bp, Homo sapiens
taagcctatactttctaccagaagc

SEQ ID NO: 29537 - DNA, 25 bp, Homo sapiens
tgtatattacttgtccattccttta

SEQ ID NO: 29538 - DNA, 25 bp, Homo sapiens
tgtccattgctagaacaaccgaata

SEQ ID NO: 29539 - DNA, 25 bp, Homo sapiens
ttcctgcagcagttctaagctactg

SEQ ID NO: 29540 - DNA, 25 bp, Homo sapiens
tttcctgagagccctaaaaacacag

SEQ ID NO: 29541 - DNA, 25 bp, Homo sapiens
agcagcagacagtcttcattcatcc

SEQ ID NO: 29542 - DNA, 25 bp, Homo sapiens
atatccgtgtacgcaaggccatcac

SEQ ID NO: 29543 - DNA, 25 bp, Homo sapiens
cacacggcacggttgactcggagtg

SEQ ID NO: 29544 - DNA, 25 bp, Homo sapiens
cacgaacttgtcttgaccaccaaag

SEQ ID NO: 29545 - DNA, 25 bp, Homo sapiens
cgccgagcccgggatgtgcgggaac

SEQ ID NO: 29546 - DNA, 25 bp, Homo sapiens
gagctagaagatccccatgctaaga

SEQ ID NO: 29547 - DNA, 25 bp, Homo sapiens
ggaagggctcttggaacgtgtggaa

SEQ ID NO: 29548 - DNA, 25 bp, Homo sapiens
ggctgagagtggttactcttcccag

SEQ ID NO: 29549 - DNA, 25 bp, Homo sapiens
tcctgccagggggactatatccgtg

SEQ ID NO: 29550 - DNA, 25 bp, Homo sapiens
tggaggtggctccccattattataa

SEQ ID NO: 29551 - DNA, 25 bp, Homo sapiens
tgtacagttcagatcgatgcgccga

SEQ ID NO: 29552 - DNA, 25 bp, Homo sapiens
aaatcttgtacctagcacagtattg

SEQ ID NO: 29553 - DNA, 25 bp, Homo sapiens
aagtgataaaacatctctcttctcc

SEQ ID NO: 29554 - DNA, 25 bp, Homo sapiens
agtctgtcagtttcttaattgtgga

SEQ ID NO: 29555 - DNA, 25 bp, Homo sapiens
gacataccattttcagttctgctgt

SEQ ID NO: 29556 - DNA, 25 bp, Homo sapiens
gtagctctaatacctggagttttct

SEQ ID NO: 29557 - DNA, 25 bp, Homo sapiens
gtcactcacttagccttggcatttg

SEQ ID NO: 29558 - DNA, 25 bp, Homo sapiens
gttctgctgtcacttggaagttcag

SEQ ID NO: 29559 - DNA, 25 bp, Homo sapiens
taacatgcctgtgtcactcacttag

SEQ ID NO: 29560 - DNA, 25 bp, Homo sapiens
tatcttctgttttggtctctggtga

SEQ ID NO: 29561 - DNA, 25 bp, Homo sapiens
tctccttcccaactactgcatgaag

SEQ ID NO: 29562 - DNA, 25 bp, Homo sapiens
tctggccttttgctgtaacatgcct

SEQ ID NO: 29563 - DNA, 25 bp, Homo sapiens
aaaccattggctgggcctttgagga

SEQ ID NO: 29564 - DNA, 25 bp, Homo sapiens
aatgtaaatgttggccgagtcggta

SEQ ID NO: 29565 - DNA, 25 bp, Homo sapiens
agaaagacaactttcctctgcgcgg

SEQ ID NO: 29566 - DNA, 25 bp, Homo sapiens
caagtcccagtctgttttctggcat

SEQ ID NO: 29567 - DNA, 25 bp, Homo sapiens
cagggcactgtgttgggaaaccatt

SEQ ID NO: 29568 - DNA, 25 bp, Homo sapiens
cccgtgttccttgtcagacagacag

SEQ ID NO: 29569 - DNA, 25 bp, Homo sapiens
ccctgagccggctgggagtggacga

SEQ ID NO: 29570 - DNA, 25 bp, Homo sapiens
ctgttttctggcatcagacaccggc

SEQ ID NO: 29571 - DNA, 25 bp, Homo sapiens
ctttccagctgaacccaaactacaa

SEQ ID NO: 29572 - DNA, 25 bp, Homo sapiens
ggagtggacgacaggacctacctcc

SEQ ID NO: 29573 - DNA, 25 bp, Homo sapiens
tgtcagacagacagactctcaggcc

SEQ ID NO: 29574 - DNA, 25 bp, Homo sapiens
aaacgtagatggctggccgatcctg

SEQ ID NO: 29575 - DNA, 25 bp, Homo sapiens
atgtgcaggtgtatcttccaacgtg

SEQ ID NO: 29576 - DNA, 25 bp, Homo sapiens
caacgtggtccccatgtacttaggg

SEQ ID NO: 29577 - DNA, 25 bp, Homo sapiens
gcagagtcgccacatcatttgagct

SEQ ID NO: 29578 - DNA, 25 bp, Homo sapiens
taaccgtgtccatgtttccatttgg

SEQ ID NO: 29579 - DNA, 25 bp, Homo sapiens
tatgggtacaacgtggctgctgtca

SEQ ID NO: 29580 - DNA, 25 bp, Homo sapiens
tattttctatcgtgcctgcgatctt

SEQ ID NO: 29581 - DNA, 25 bp, Homo sapiens
tcatcactgttggcatccttgtggc

SEQ ID NO: 29582 - DNA, 25 bp, Homo sapiens
tggtcggccccttggtgaataaatt

SEQ ID NO: 29583 - DNA, 25 bp, Homo sapiens
tggtcttcggaatctccttgcaaac

SEQ ID NO: 29584 - DNA, 25 bp, Homo sapiens
ttgacgttgctgtggtctgtaaccg

SEQ ID NO: 29585 - DNA, 25 bp, Homo sapiens
aaagtcagcaccttctacagaacag

SEQ ID NO: 29586 - DNA, 25 bp, Homo sapiens
acagatgccctgatcaccaaggact

SEQ ID NO: 29587 - DNA, 25 bp, Homo sapiens
agcagcatcaacatctatttgtcgc

SEQ ID NO: 29588 - DNA, 25 bp, Homo sapiens
aggacttggtactgatttagagaga

SEQ ID NO: 29589 - DNA, 25 bp, Homo sapiens
atgccctgatcaccaaggacttggt

SEQ ID NO: 29590 - DNA, 25 bp, Homo sapiens
ctcctagcagcatcaacatctattt

SEQ ID NO: 29591 - DNA, 25 bp, Homo sapiens
gcaccttctacagaacagatgccct

SEQ ID NO: 29592 - DNA, 25 bp, Homo sapiens
gcatcaacatctatttgtcgcttat

SEQ ID NO: 29593 - DNA, 25 bp, Homo sapiens
tacagaacagatgccctgatcacca

SEQ ID NO: 29594 - DNA, 25 bp, Homo sapiens
tctatttgtcgcttatttgccctgc

SEQ ID NO: 29595 - DNA, 25 bp, Homo sapiens
tgatgaatcccacaaaagtcagcac

SEQ ID NO: 29596 - DNA, 25 bp, Homo sapiens
aactggaactcagcctgcaggagct

SEQ ID NO: 29597 - DNA, 25 bp, Homo sapiens
agaggtagccactgttagcctggtg

SEQ ID NO: 29598 - DNA, 25 bp, Homo sapiens
aggagctacaggtttcttcagcagc

SEQ ID NO: 29599 - DNA, 25 bp, Homo sapiens
atggccaatggcacagcaggtacta

SEQ ID NO: 29600 - DNA, 25 bp, Homo sapiens
ccagtgcactcacggaacctgtgcc

SEQ ID NO: 29601 - DNA, 25 bp, Homo sapiens
ctcaggctatgtggactgcatccct

SEQ ID NO: 29602 - DNA, 25 bp, Homo sapiens
ctgcttgactactgctcaggctatg

SEQ ID NO: 29603 - DNA, 25 bp, Homo sapiens
tccatctcgccagccaaaatggcca

SEQ ID NO: 29604 - DNA, 25 bp, Homo sapiens
tgcatccctcaaactcgcaacaaat

SEQ ID NO: 29605 - DNA, 25 bp, Homo sapiens
tgtgcccaacagccagctggtagac

SEQ ID NO: 29606 - DNA, 25 bp, Homo sapiens
tgtgctgacctactgtccagtgcac

SEQ ID NO: 29607 - DNA, 25 bp, Homo sapiens
aatctgtcaggttcactggtacata

SEQ ID NO: 29608 - DNA, 25 bp, Homo sapiens
cacctgattactttggttgcagcac

SEQ ID NO: 29609 - DNA, 25 bp, Homo sapiens
cagctgcaggattctggcattttgc

SEQ ID NO: 29610 - DNA, 25 bp, Homo sapiens
ctccagtcccaaactaatctgtcag

SEQ ID NO: 29611 - DNA, 25 bp, Homo sapiens
ctttcttagttatttgctccttgca

SEQ ID NO: 29612 - DNA, 25 bp, Homo sapiens
gaaattatattaacgaccctgctaa

SEQ ID NO: 29613 - DNA, 25 bp, Homo sapiens
gaccctgctaatatcctttcttagt

SEQ ID NO: 29614 - DNA, 25 bp, Homo sapiens
gatattcagttcattcacctgatta

SEQ ID NO: 29615 - DNA, 25 bp, Homo sapiens
gatggctcagaacatgtacacagac

SEQ ID NO: 29616 - DNA, 25 bp, Homo sapiens
ggcattttgcatgccattctccatc

SEQ ID NO: 29617 - DNA, 25 bp, Homo sapiens
ttactcttcttgttaactagtcatt

SEQ ID NO: 29618 - DNA, 25 bp, Homo sapiens
aaaatgtgaagcttggttgactgat

SEQ ID NO: 29619 - DNA, 25 bp, Homo sapiens
acaacctaacttatggactgtttga

SEQ ID NO: 29620 - DNA, 25 bp, Homo sapiens
actgtgcatccgcctgaaagtgttt

SEQ ID NO: 29621 - DNA, 25 bp, Homo sapiens
agccatgctttatgtgggttatcat

SEQ ID NO: 29622 - DNA, 25 bp, Homo sapiens
gaaagtgttttggcctatatacctc

SEQ ID NO: 29623 - DNA, 25 bp, Homo sapiens
taaaggccgtggctgtgctgtattt

SEQ ID NO: 29624 - DNA, 25 bp, Homo sapiens
tattctctattttacttttctgcca

SEQ ID NO: 29625 - DNA, 25 bp, Homo sapiens
tggcctatatacctcactagccatg

SEQ ID NO: 29626 - DNA, 25 bp, Homo sapiens
ttctgccaaaataaacctgttcttc

SEQ ID NO: 29627 - DNA, 25 bp, Homo sapiens
ttctttcaacctatacaacctaact

SEQ ID NO: 29628 - DNA, 25 bp, Homo sapiens
ttgtttatgcactttttccttactg

SEQ ID NO: 29629 - DNA, 25 bp, Homo sapiens
agattgcggtgcctgagaacctggt

SEQ ID NO: 29630 - DNA, 25 bp, Homo sapiens
agggcccaggtctgtgtgatatctg

SEQ ID NO: 29631 - DNA, 25 bp, Homo sapiens
caagaagggcgagttcctgccaggc

SEQ ID NO: 29632 - DNA, 25 bp, Homo sapiens
cgggtcacctacgagcagggagtga

SEQ ID NO: 29633 - DNA, 25 bp, Homo sapiens
ctccccttctggtagtcataggcag

SEQ ID NO: 29634 - DNA, 25 bp, Homo sapiens
ctggtggagattgcggtgcctgaga

SEQ ID NO: 29635 - DNA, 25 bp, Homo sapiens
gaaggggggcaagacgttggtggag

SEQ ID NO: 29636 - DNA, 25 bp, Homo sapiens
gctcaatacctcatcagtcagcggg

SEQ ID NO: 29637 - DNA, 25 bp, Homo sapiens
ggcaggattgagtgacggttgggaa

SEQ ID NO: 29638 - DNA, 25 bp, Homo sapiens
tgacctcagcttggtgtagtcctgc

SEQ ID NO: 29639 - DNA, 25 bp, Homo sapiens
tgggatgaggcctgtggtgtgtgct

SEQ ID NO: 29640 - DNA, 25 bp, Homo sapiens
aaatccgtggactacgaggtgttcg

SEQ ID NO: 29641 - DNA, 25 bp, Homo sapiens
aaccatctctaagcttgaatactct

SEQ ID NO: 29642 - DNA, 25 bp, Homo sapiens
acaaagtcaattccatgaagtcctg

SEQ ID NO: 29643 - DNA, 25 bp, Homo sapiens
aggtgttcggaagagtgcagggtgt

SEQ ID NO: 29644 - DNA, 25 bp, Homo sapiens
agtcctggctgagcaaggttggaag

SEQ ID NO: 29645 - DNA, 25 bp, Homo sapiens
caaggttggaagccctagttctcgc

SEQ ID NO: 29646 - DNA, 25 bp, Homo sapiens
cccagtcactcaaatccgtggacta

SEQ ID NO: 29647 - DNA, 25 bp, Homo sapiens
gtgcaggggccagaagacaaagtca

SEQ ID NO: 29648 - DNA, 25 bp, Homo sapiens
gtgcagggtgtttgcttcagaatgt

SEQ ID NO: 29649 - DNA, 25 bp, Homo sapiens
tcgcattgaccgcacaaacttttct

SEQ ID NO: 29650 - DNA, 25 bp, Homo sapiens
tgaccgcacaaacttttctaatgaa

SEQ ID NO: 29651 - DNA, 25 bp, Homo sapiens
atggcttggatattgctcccagata

SEQ ID NO: 29652 - DNA, 25 bp, Homo sapiens
cagagcacttgcagagcctgggaca

SEQ ID NO: 29653 - DNA, 25 bp, Homo sapiens
cttcctgcaatctttggtgtctgcc

SEQ ID NO: 29654 - DNA, 25 bp, Homo sapiens
gcagcaggatttctccttcctgcaa

SEQ ID NO: 29655 - DNA, 25 bp, Homo sapiens
gcagcttttgcttgggtggagtgtt

SEQ ID NO: 29656 - DNA, 25 bp, Homo sapiens
ggactaattgcttccactttgactg

SEQ ID NO: 29657 - DNA, 25 bp, Homo sapiens
taagcaggatccggaatccgcctgg

SEQ ID NO: 29658 - DNA, 25 bp, Homo sapiens
taattgctgtccggaaactcttcac

SEQ ID NO: 29659 - DNA, 25 bp, Homo sapiens
tgactggcctaattttctaccttat

SEQ ID NO: 29660 - DNA, 25 bp, Homo sapiens
ttatcagacttcttcctgaccagga

SEQ ID NO: 29661 - DNA, 25 bp, Homo sapiens
ttccaccttctacagcattgtcatt

SEQ ID NO: 29662 - DNA, 25 bp, Homo sapiens
accaggggcaagccatgcacatgca

SEQ ID NO: 29663 - DNA, 25 bp, Homo sapiens
acgccagaactctgtctggctctcc

SEQ ID NO: 29664 - DNA, 25 bp, Homo sapiens
caggggcagtcgttgagcctttgag

SEQ ID NO: 29665 - DNA, 25 bp, Homo sapiens
cagtgatctctctgactttcaatca

SEQ ID NO: 29666 - DNA, 25 bp, Homo sapiens
ccccaagcaagtctcaaagccagtg

SEQ ID NO: 29667 - DNA, 25 bp, Homo sapiens
ccgatcctgttctgagcaagctcga

SEQ ID NO: 29668 - DNA, 25 bp, Homo sapiens
gcaagctcgagtcttcgtggatgat

SEQ ID NO: 29669 - DNA, 25 bp, Homo sapiens
ggctccagaacgaagatccacactt

SEQ ID NO: 29670 - DNA, 25 bp, Homo sapiens
gtgagaagacatctctttctgctca

SEQ ID NO: 29671 - DNA, 25 bp, Homo sapiens
tattccttttcaggcctgcagagtg

SEQ ID NO: 29672 - DNA, 25 bp, Homo sapiens
ttgaggactactctcagtcgctgca

SEQ ID NO: 29673 - DNA, 25 bp, Homo sapiens
agaagagccactaactcgtgacctc

SEQ ID NO: 29674 - DNA, 25 bp, Homo sapiens
aggctgggccgtgagcaggtgggcc

SEQ ID NO: 29675 - DNA, 25 bp, Homo sapiens
attcatacacgcaggtgggctccag

SEQ ID NO: 29676 - DNA, 25 bp, Homo sapiens
ctctgtcctgccttgttattgtaag

SEQ ID NO: 29677 - DNA, 25 bp, Homo sapiens
ctgcccgcctcattgagatgtaccg

SEQ ID NO: 29678 - DNA, 25 bp, Homo sapiens
gccttcctgatcctctgtagaaagg

SEQ ID NO: 29679 - DNA, 25 bp, Homo sapiens
gccttgttattgtaagtgccttcaa

SEQ ID NO: 29680 - DNA, 25 bp, Homo sapiens
gctcctattcatacacgcaggtggg

SEQ ID NO: 29681 - DNA, 25 bp, Homo sapiens
gtgagcaggtgggccgttgagttac

SEQ ID NO: 29682 - DNA, 25 bp, Homo sapiens
gttgagttacctctgtgctggatcc

SEQ ID NO: 29683 - DNA, 25 bp, Homo sapiens
tttatcttctgtagagctagccgcc

SEQ ID NO: 29684 - DNA, 25 bp, Homo sapiens
aggagggcgagagtcacagggttgc

SEQ ID NO: 29685 - DNA, 25 bp, Homo sapiens
agggttgcctgggtggtgtttgaag

SEQ ID NO: 29686 - DNA, 25 bp, Homo sapiens
caagagccgcaccatgcaggatggg

SEQ ID NO: 29687 - DNA, 25 bp, Homo sapiens
ctccgtacagctgaagagttgggcg

SEQ ID NO: 29688 - DNA, 25 bp, Homo sapiens
gaagggtaatagtcacaggagctgc

SEQ ID NO: 29689 - DNA, 25 bp, Homo sapiens
gccgcaccatgcaggatggggagga

SEQ ID NO: 29690 - DNA, 25 bp, Homo sapiens
gtaatagtcacaggagctgcagtca

SEQ ID NO: 29691 - DNA, 25 bp, Homo sapiens
tcagcagagagaccctgaactctgc

SEQ ID NO: 29692 - DNA, 25 bp, Homo sapiens
tctcactctccgtacagctgaagag

SEQ ID NO: 29693 - DNA, 25 bp, Homo sapiens
tctgctaagggaaggtcttgggacc

SEQ ID NO: 29694 - DNA, 25 bp, Homo sapiens
tggggaggagggcgagagtcacagg

SEQ ID NO: 29695 - DNA, 25 bp, Homo sapiens
agagtggctcctggtacgttgagac

SEQ ID NO: 29696 - DNA, 25 bp, Homo sapiens
agcagtgggctcactctgaagacct

SEQ ID NO: 29697 - DNA, 25 bp, Homo sapiens
atgcctggttgctttaatttcctcc

SEQ ID NO: 29698 - DNA, 25 bp, Homo sapiens
gacagacaggctcttagcagcttcc

SEQ ID NO: 29699 - DNA, 25 bp, Homo sapiens
gctagtgacttgtgtcccatgatcc

SEQ ID NO: 29700 - DNA, 25 bp, Homo sapiens
gggtcgctaatgctgtttcggtgaa

SEQ ID NO: 29701 - DNA, 25 bp, Homo sapiens
gtgacatctttgtgtcctactctac

SEQ ID NO: 29702 - DNA, 25 bp, Homo sapiens
tgcacgtggcctcttgagcagtggc

SEQ ID NO: 29703 - DNA, 25 bp, Homo sapiens
tgctctttctctgccagtgacagac

SEQ ID NO: 29704 - DNA, 25 bp, Homo sapiens
tggacgccatatctagtttgcccac

SEQ ID NO: 29705 - DNA, 25 bp, Homo sapiens
ttgagaccctggacgacatctttga

SEQ ID NO: 29706 - DNA, 25 bp, Homo sapiens
actttctccttactcatcaatcaag

SEQ ID NO: 29707 - DNA, 25 bp, Homo sapiens
agataaacactttctccttactcat

SEQ ID NO: 29708 - DNA, 25 bp, Homo sapiens
atagtatcatcatattcccttttgc

SEQ ID NO: 29709 - DNA, 25 bp, Homo sapiens
gaggccaaatctgtaaaatcaaaat

SEQ ID NO: 29710 - DNA, 25 bp, Homo sapiens
gccagataaacactttctccttact

SEQ ID NO: 29711 - DNA, 25 bp, Homo sapiens
gggacattcaaacaatgtacatgaa

SEQ ID NO: 29712 - DNA, 25 bp, Homo sapiens
gtatatatgtttaaactccaaagtt

SEQ ID NO: 29713 - DNA, 25 bp, Homo sapiens
taaactccaaagtttgggacattca

SEQ ID NO: 29714 - DNA, 25 bp, Homo sapiens
tatcatcatattcccttttgctatc

SEQ ID NO: 29715 - DNA, 25 bp, Homo sapiens
tcccttttctctatgccagataaac

SEQ ID NO: 29716 - DNA, 25 bp, Homo sapiens
tctccttactcatcaatcaagaata

SEQ ID NO: 29717 - DNA, 25 bp, Homo sapiens
aagaggtgacaacctcagtctccct

SEQ ID NO: 29718 - DNA, 25 bp, Homo sapiens
acaagagttaatgccctaccctctg

SEQ ID NO: 29719 - DNA, 25 bp, Homo sapiens
cacaaggtacgaacctctcaggcct

SEQ ID NO: 29720 - DNA, 25 bp, Homo sapiens
ctccctactctccagaatccagggg

SEQ ID NO: 29721 - DNA, 25 bp, Homo sapiens
cttcaggatgatcaccgaggctccc

SEQ ID NO: 29722 - DNA, 25 bp, Homo sapiens
gagacactggactttttacccattt

SEQ ID NO: 29723 - DNA, 25 bp, Homo sapiens
gtcaagcatcttcggccgatattta

SEQ ID NO: 29724 - DNA, 25 bp, Homo sapiens
gttttacaccggtcacattttctat

SEQ ID NO: 29725 - DNA, 25 bp, Homo sapiens
taaacatgggcagcttccttcagga

SEQ ID NO: 29726 - DNA, 25 bp, Homo sapiens
tctccctttgggacctgtccaaggg

SEQ ID NO: 29727 - DNA, 25 bp, Homo sapiens
tcttgcctgcttcactgtggatggg

SEQ ID NO: 29728 - DNA, 25 bp, Homo sapiens
agagtctggggctgtgtgttgagca

SEQ ID NO: 29729 - DNA, 25 bp, Homo sapiens
atctgtcctgttactttctggtcat

SEQ ID NO: 29730 - DNA, 25 bp, Homo sapiens
catcccaggttctgacttttaccag

SEQ ID NO: 29731 - DNA, 25 bp, Homo sapiens
gagtgttttgagccatggccacgtt

SEQ ID NO: 29732 - DNA, 25 bp, Homo sapiens
gatgctagacactcatttagtgccc

SEQ ID NO: 29733 - DNA, 25 bp, Homo sapiens
ggccaagcgaggtctcaggtgcaaa

SEQ ID NO: 29734 - DNA, 25 bp, Homo sapiens
ggccacgttgtcattgtgagtctat

SEQ ID NO: 29735 - DNA, 25 bp, Homo sapiens
gtccagcgaatgacgtctgtggcca

SEQ ID NO: 29736 - DNA, 25 bp, Homo sapiens
gtctatagcttgactccttggagaa

SEQ ID NO: 29737 - DNA, 25 bp, Homo sapiens
gtttattccagcgatgtgacttttt

SEQ ID NO: 29738 - DNA, 25 bp, Homo sapiens
tttagtgcccagggagtccagcgaa

SEQ ID NO: 29739 - DNA, 25 bp, Homo sapiens
aaaaatgatggccccttgagctctt

SEQ ID NO: 29740 - DNA, 25 bp, Homo sapiens
agataaaatgtgacttcccctgctc

SEQ ID NO: 29741 - DNA, 25 bp, Homo sapiens
caaaggttggatccatcttctctcc

SEQ ID NO: 29742 - DNA, 25 bp, Homo sapiens
cccacagctccaggaaccttgaagc

SEQ ID NO: 29743 - DNA, 25 bp, Homo sapiens
ccctgacttggctgtgggctttggg

SEQ ID NO: 29744 - DNA, 25 bp, Homo sapiens
cctgctacacatgccctgaatgaat

SEQ ID NO: 29745 - DNA, 25 bp, Homo sapiens
ctttctagatctctcccagtgaggc

SEQ ID NO: 29746 - DNA, 25 bp, Homo sapiens
gaggtaccaggcaaacttcctgcta

SEQ ID NO: 29747 - DNA, 25 bp, Homo sapiens
gtatgtctgcatcgatgtctgtact

SEQ ID NO: 29748 - DNA, 25 bp, Homo sapiens
gtttctgaattttgtctacctcaca

SEQ ID NO: 29749 - DNA, 25 bp, Homo sapiens
tccatcttctctccgaggttgtgaa

SEQ ID NO: 29750 - DNA, 25 bp, Homo sapiens
aaaacattctggccgctccaggaat

SEQ ID NO: 29751 - DNA, 25 bp, Homo sapiens
agcccttggtgtgggttttatctct

SEQ ID NO: 29752 - DNA, 25 bp, Homo sapiens
aggacgagcccagtgtagttgtgtg

SEQ ID NO: 29753 - DNA, 25 bp, Homo sapiens
cccagcttgggaaatagcccttggt

SEQ ID NO: 29754 - DNA, 25 bp, Homo sapiens
ccgctccaggaattctgaagttctg

SEQ ID NO: 29755 - DNA, 25 bp, Homo sapiens
ctcccaaggacgagcccagtgtagt

SEQ ID NO: 29756 - DNA, 25 bp, Homo sapiens
ggaattgaccgaaagctctatgttt

SEQ ID NO: 29757 - DNA, 25 bp, Homo sapiens
gtgttctccgtggtggaattgaccg

SEQ ID NO: 29758 - DNA, 25 bp, Homo sapiens
tgttctcaaattccccagcttggga

SEQ ID NO: 29759 - DNA, 25 bp, Homo sapiens
ttgtgtgggcgtgaactctgcccgt

SEQ ID NO: 29760 - DNA, 25 bp, Homo sapiens
tttatctctggtttgtgttctccgt

SEQ ID NO: 29761 - DNA, 25 bp, Homo sapiens
actttggtcacatctgtctctagat

SEQ ID NO: 29762 - DNA, 25 bp, Homo sapiens
cagcctgcggggtgaatgaacccat

SEQ ID NO: 29763 - DNA, 25 bp, Homo sapiens
gaatgaacccatgtgtgaactgcac

SEQ ID NO: 29764 - DNA, 25 bp, Homo sapiens
gggtcgcgtagttgctgaaacctaa

SEQ ID NO: 29765 - DNA, 25 bp, Homo sapiens
gtaacactttggtcacatctgtctc

SEQ ID NO: 29766 - DNA, 25 bp, Homo sapiens
gtacctgcagcctacaggataagga

SEQ ID NO: 29767 - DNA, 25 bp, Homo sapiens
taaaatttaacccacaagcatatta

SEQ ID NO: 29768 - DNA, 25 bp, Homo sapiens
taaggaagttcacagcctgcggggt

SEQ ID NO: 29769 - DNA, 25 bp, Homo sapiens
tcctttagtcttttgggtcgcgtag

SEQ ID NO: 29770 - DNA, 25 bp, Homo sapiens
tctgtctctagatggtcattgaatt

SEQ ID NO: 29771 - DNA, 25 bp, Homo sapiens
tgaaacctaagtacctgcagcctac

SEQ ID NO: 29772 - DNA, 25 bp, Homo sapiens
aaacccaggtgagacagcaccctct

SEQ ID NO: 29773 - DNA, 25 bp, Homo sapiens
cctgggcattcttagctgcgggagg

SEQ ID NO: 29774 - DNA, 25 bp, Homo sapiens
gaaaaagtggggcatcctccttatc

SEQ ID NO: 29775 - DNA, 25 bp, Homo sapiens
gcctgctctgccaagacaagaactt

SEQ ID NO: 29776 - DNA, 25 bp, Homo sapiens
ggcctatgtttctggcttgggcttt

SEQ ID NO: 29777 - DNA, 25 bp, Homo sapiens
gtgggcattcatggagattctcctc

SEQ ID NO: 29778 - DNA, 25 bp, Homo sapiens
tcagggaaccagcacttcccaaacc

SEQ ID NO: 29779 - DNA, 25 bp, Homo sapiens
tcctggtgctcatgggcacctgggc

SEQ ID NO: 29780 - DNA, 25 bp, Homo sapiens
tgaataccctatctgactccttggg

SEQ ID NO: 29781 - DNA, 25 bp, Homo sapiens
tgacgctggtcattatcttgctgca

SEQ ID NO: 29782 - DNA, 25 bp, Homo sapiens
ttcccaaaccgcagactacatcttt

SEQ ID NO: 29783 - DNA, 25 bp, Homo sapiens
aacagggtcttctcagtgtatgcaa

SEQ ID NO: 29784 - DNA, 25 bp, Homo sapiens
acatcaggtgtttttctacatactt

SEQ ID NO: 29785 - DNA, 25 bp, Homo sapiens
atgccttacaaactccagaggccat

SEQ ID NO: 29786 - DNA, 25 bp, Homo sapiens
cctctgtacctctcataactggtca

SEQ ID NO: 29787 - DNA, 25 bp, Homo sapiens
ctacatactttttacacagattcta

SEQ ID NO: 29788 - DNA, 25 bp, Homo sapiens
ggacagttttcacacatatctacct

SEQ ID NO: 29789 - DNA, 25 bp, Homo sapiens
ggctgttgatgcttattctctgtaa

SEQ ID NO: 29790 - DNA, 25 bp, Homo sapiens
gtctagacaccatttctgttgatga

SEQ ID NO: 29791 - DNA, 25 bp, Homo sapiens
gtgcacctctaatatatgccttaca

SEQ ID NO: 29792 - DNA, 25 bp, Homo sapiens
tatctacctgtataaccctctgtac

SEQ ID NO: 29793 - DNA, 25 bp, Homo sapiens
tgtactagttcttaggcttgtcctt

SEQ ID NO: 29794 - DNA, 25 bp, Homo sapiens
aaggggccatcacaggatgccaccc

SEQ ID NO: 29795 - DNA, 25 bp, Homo sapiens
agaaggggccatcacaggatgccac

SEQ ID NO: 29796 - DNA, 25 bp, Homo sapiens
atcttgctaataaacactggctctg

SEQ ID NO: 29797 - DNA, 25 bp, Homo sapiens
cacagccgcctttgggttccatctt

SEQ ID NO: 29798 - DNA, 25 bp, Homo sapiens
ccgcctttgggttccatcttgctaa

SEQ ID NO: 29799 - DNA, 25 bp, Homo sapiens
cgcctttgggttccatcttgctaat

SEQ ID NO: 29800 - DNA, 25 bp, Homo sapiens
gaagaaggggccatcacaggatgcc

SEQ ID NO: 29801 - DNA, 25 bp, Homo sapiens
gaaggggccatcacaggatgccacc

SEQ ID NO: 29802 - DNA, 25 bp, Homo sapiens
gccgcctttgggttccatcttgcta

SEQ ID NO: 29803 - DNA, 25 bp, Homo sapiens
gctaataaacactggctctgggact

SEQ ID NO: 29804 - DNA, 25 bp, Homo sapiens
ggttccatcttgctaataaacactg

SEQ ID NO: 29805 - DNA, 25 bp, Homo sapiens
gttccatcttgctaataaacactgg

SEQ ID NO: 29806 - DNA, 25 bp, Homo sapiens
taaacactggctctgggactagaaa

SEQ ID NO: 29807 - DNA, 25 bp, Homo sapiens
tagaggctccccagggctcccttat

SEQ ID NO: 29808 - DNA, 25 bp, Homo sapiens
ttgggttccatcttgctaataaaca

SEQ ID NO: 29809 - DNA, 25 bp, Homo sapiens
tttgggttccatcttgctaataaac

1. A method for classifying an isolated biological test sample obtained from a cancer patient, including the steps of:
selecting a set of marker molecules from;
a) any combination of 100 or more of the polynucleotides listed in Table 1, wherein the polynucleotides are detectable with the oligonucleotide probes SEQ ID NOS: 1-24196;
b) any combination of 100 or more of the polynucleotides listed in Table 3, wherein the polynucleotides are detectable with the oligonucleotide probes SEQ ID NOS: 171-270 and 25777-27864;
c) any combination of 15 or more of the polynucleotides listed in Table 6, wherein the polynucleotides are detectable with the oligonucleotide probes SEQ ID NOS: 1-170 and 24197-25776;
d) any combination of 2 or more of the polynucleotides listed in Table 8, wherein the polynucleotides are detectable with the oligonucleotide probes SEQ ID NOS: 1-11, 171-183, 271-383, 25777-25787 and 27865-29496; and
e) any combination of 2 or more of the polynucleotides listed in Table 9, wherein the polynucleotides are detectable with the oligonucleotide probes SEQ ID NOS: 384-476, 27865-27880 and 29497-29809,
providing a database populated with reference expression data, the reference expression data including expression levels of a plurality of molecules in a plurality of reference samples, the plurality of molecules including at least the marker molecules, each reference sample having a pre-assigned value for each of one or more clinically significant variables selected from the group including disease state, disease prognosis, and treatment response;
accepting input expression data, the input expression data including a test vector of expression levels of the marker molecules in the isolated biological test sample; and
assigning one of said pre-assigned values to the test sample for at least one of said clinically significant variables by passing the test vector to a statistical classification program;
wherein the statistical classification program has been trained to distinguish among said pre-assigned values on the basis of that part of the reference data corresponding to expression levels of the marker molecules.

2. A method according to claim 1, wherein the clinically significant variables are organised according to a hierarchy and the levels of the hierarchy are selected from the group consisting of anatomical system, tissue type and tumor subtype.

3. A method according to claim 1, wherein the disease prognosis is risk of recurrence.

4. A method according to claim 1 which is used to determine the risk of breast cancer recurrence, wherein the set of marker molecules includes the 200 marker molecules listed in Table 3, that are detectable with the oligonucleotide probes SEQ ID NOS: 171-270 and 25777-27864.

5. A method according to claim 1 which is used to determine the risk of colon cancer recurrence, wherein the set of marker molecules includes the 163 marker molecules listed in Table 6, that are detectable with the oligonucleotide probes SEQ ID NOS: 1-170 and 24197-25776.

6. A method according to claim 1 which is used to identify patients with stage I/II adenocarcinoma who are at increased risk of death, wherein the set of marker molecules includes the 160 marker molecules listed in Table 8, that are detectable with the oligonucleotide probes SEQ ID NOS: 1-11, 171-183, 271-383, 25777-25787 and 27865-29496.

7. A method according to claim 1 which is used to predict adjuvant chemotherapy response in patients with non-small-cell lung cancer, wherein the set of marker molecules includes the 37 marker molecules listed in Table 9, that are detectable with the oligonucleotide probes SEQ ID NOS: 384-476, 27865-27880 and 29497-29809.

8. A method of classifying an isolated biological test sample obtained from a cancer patient, including the step of:
comparing expression levels in the test sample of a set of marker molecules, selected from;
a) any combination of 100 or more of the polynucleotides listed in Table 1, wherein the polynucleotides are detectable with the oligonucleotide probes SEQ ID NOS: 1-24196;
b) any combination of 100 or more of the polynucleotides listed in Table 3, wherein the polynucleotides are detectable with the oligonucleotide probes SEQ ID NOS: 171-270 and 25777-27864;
c) any combination of 15 or more of the polynucleotides listed in Table 6, wherein the polynucleotides are detectable with the oligonucleotide probes SEQ ID NOS: 1-170 and 24197-25776;
d) any combination of 2 or more of the polynucleotides listed in Table 8, wherein the polynucleotides are detectable with the oligonucleotide probes SEQ ID NOS: 1-11, 171-183, 271-383, 25777-25787 and 27865-29496; and
e) any combination of 2 or more of the polynucleotides listed in Table 9, wherein the polynucleotides are detectable with the oligonucleotide probes SEQ ID NOS: 384-476, 27865-27880 and 29497-29809,
to expression levels of said set of marker molecules in a set of reference samples, each member of the set of reference samples having a known clinical annotation, to assign a clinical annotation to the isolated biological test sample,
wherein the clinical annotation is selected from the group including anatomical system, tissue of origin, tumor subtype, risk of cancer recurrence, prognosis of increased risk of death, and prediction of adjuvant chemotherapy response.

9.-26. (canceled)
